United States Patent Application Publication US 2026/0191916 A1 - sequence listing, part 80

SEQ ID NO: 575 - DNA, 4490635 bp, Enterocloster bolteae (residues 2,993,759-4,490,635 of 4,490,635)
  source 1..4490635: mol_type = genomic DNA
cattacccaggaagaattggaatatatcctggcctgcttgttatgcgtctgcgtaaaccacttaatcgcggtgtaattgcttcccagttccttctccaggatgcggcgcacattacgtgcaaacccgcgtccgccattgttagactcaatcctggccaggtttacttccccgtacagcagcatcctggccatggcaagttccgtaacctccatgggttcttttgtgtacagcacatccagaacataagcctcatcggcaaacgtcacgccgtaattgatgctgcaaaggtaatcctcgccggtatccgctgtgtcagtgtagttccgaatctccttaaactgcggcagctccccagagtaggtcttaaagctggtgtacagcctgccctttaagtcaataggctcctgctggtagttggcagatgctatgtcggcgcccatggccttaatcttggcttcgtaggacttccttgacaagacttcagagcatagcattgtcccatcatcctgcagggccttcatggagatatgccgcatcctagccccagcctccttgaaatgttccagcgcccggcctgccaggtcatcactggcccatcgggtcatgataatgataatcttcccgccctcttccagacgggacagcattgtgtccgtgaaccaggtccagtgcttctctttggtcagctcgttgttggcctcctcggcgtttttgatgaggtcatcaatgataagcagagacgcaccgaaacctgttgctgtaccggtcggggacgtggccaggtagttgttgtatccgccctccaggctccagagattcatggcgccgtcaccgcgcttgatggatacccccgggaagatatcggagaatacaatccggttctcatctgctttctcctcctggatgtcgttgcggacattctttgagaacatggttgagagcgtctcattgtaggaaccggtcatgattttctgtgtccggtcattacctaacacccattcaaccaggaggcctgccgtccggctcttgccatgcctgggtggttcgttgaccaccataacctcatccttagactgaatgaagtcctggaactcgctgcagaggtcaaccaggtactgtctgtcttctttgtagaagtcaggagcttttaaattgcaataaaaaaagaactcgcgtcttgcaagctctatcttcgcccctctgattatggtctctctatccaccatgtatcagcttcttcaattcttcggttgtcagtccggcgtaaggattattaatatcgacctggccggacagctccaccttgtctttgaacatccccagatggcgccccaggagctccaaggctcttaacctgtcataggtttccacatttattccaaactttgtttccttgattacggagatagccgcccgtttttcttctggcagttccgctgtcgggattatcctgaccacatcccttgtccgcacctggccagtatcgggatccaccacataagagttattacggatgaccggctctcgcacaacctgtgcaaaatcggttccgttaacgctggcaatcttgcgcagttcctccaatacccagtcctgcgtaatctcagtacgcttctcccgttctttcatgcgctcttgtatatattccgcaaccttagcatttcttagcatcctgcttccgttgactgctgccgtatcatcctttttgcagctcggatacgccaccttgtaagccctggtggcattaaggtcaattaagtattcatctgcaaatatcttctgttttggcgttaatgccatccagactcacctccaaccaataaaagtgcctgctcgtaaaagccaaaactcttttatatgatttatatttataataattctgctattgctgtaactataccagaagctattagtccaaataaaaaggcaaatattctctctttccagcgcgctttgggtgagttgagctgcgtaagcatatcttttatttcaataaaataatcatccgaaagcttaattttatcgccgtattcttttatttcttgttcacttccactggtgtctagcgtttcacctttttgttcaaattcacggactttatcacgaatttctgctatttcttctgaactaatctgccccagctgggttataatatcggatgtaggaatcttaagtattttatcgaatttcaaagaaactattactggtgtttcttttatcaaagtacgcattatccatgcattctgattatttatatgctttttagaactaatttgtataactcttaaagtatttcctgattgatctaatacaactaccggactattcttttcttgaactcccctaactagatatataccaccactaccatacaccataaattttcctcctgaattgtaaaatcctttgtaactcatacatttttacattttttactttataatacaccaaaatctgacaaaagaaaagcccccaccgtatcagcagggacatattcaaaggagaaaatctacgtatccggaaaatgtcatgggggataaaaccagatacctcaccgcttgtgtaccctgcggcattgtccgttaatgtacaggtctgtcttatgagagattacacaataccggttagtcagccaccagggtgtgatacctggcggccgtaaatcaaggagctttacaattacgagttatccatttatcatattcttccaaatagacaaatgcactccctaccaacaaatggttcgtttctagcagctattacaaacccttccttcatagtctgtatataagcactgccgtgtgcacagttgaaataccccactccatcctgcgctcttatcataagtgaaattggcaaaaaattttcactattacataaatcaggataaggaataggcgcatcatttaaagctcctacgactccattgattttatacaatgcctcaaacggaaacgtatcctctccgttgcttccacaacacccacagttaatcgtaatacagcttgctttctcattcataattaaaacctctctttctttgaaaacaaaagcagccatccagttacataccagacagctgctcattgtaggggagtgaaaaattaagtctttttcgtatcacctaattttgcatattacaattataaatcgtccaaacggacatggcaaggacacgattttgacatgctcctgtcaaggccctaatccaacataagggcgtctgcaccaaagagatatacactaagtatccctgtaagttccgttatccaccgtctggccgtccgctctccatatccgtaaatctctgcaatattctcgtatgtcatcccatccaggtagaaatacttaaaggccagatacttctcatgcgtatttttccgacactcctcatcctccaggagcttcaggcacttgtctatgtgacctatcatgacaacgctccggagcttgctcttaagaatgctgttgataaaaatatcctcctccgtgaactcctccagttcttccctattgtccatatcagaaagctccgccacgccctcctccacactctgacaaattctgttataattctccatcaacttcttagtattctggaaaatctttgtgcgcttatttctctgtgtctgtttttcatgttctttgaccgcttcctttgcggccagccttgccacttcttccagtgcttctgcctgcttcaccggcatcacctcctcccgcatccagatgcggacacgcccagcacccgtaccgtatcctgcccttgttgttgcgctggccatcacacccgtgacgcccgttgtctatgtaacattgtctcatagtaccatatcactcccttcggcggctcccgcagctccggaaccgggcacaggctggtgtacatataggccggcgccgtccggatgcgctccttgatggcctcgtcggcctgagcggccagggccttgctgcggtcgatgcggctgaccttggactgcttactgcttttctttctcatagacaccactgcctcattacgtgtgttaccacctttaggagctgtactgcaagattcagtcctatataaaatcctgctcctacgatgatgccaaagctgtaccattcaagtacctttttaatacactccttgcacatctcctgattctcctttcgtatcaaagtttcagtttggttcatcatgatatttcaatgcctggccgcaagttgaacagaaataatcatcatcctcaaccacatctgaatcacataccggacagaggcactctgcttcatcaccagctgaataatatgattgatatgctggtgtccacaccaccattctcggctcacttttgtcttttaaatactggacttctcctggctccaggccggtatcctcataggctttcaatctctcaattaattcgcggtatggattacctttcatgataattgcgggcaatccagtatcacttgtggaataagccaacagtctgccttggtcatcaaccttcgttaatcgttccatgctgttctccttccgaaaatttcagttttgctaactaaatggtttcggtaaagacatccaagccaacacatcctcgtcataacgtaatggcgttccccatctatacccataccatgtgccaatggtcacatccctatcccacagggtaatcaacacagtatcccctatttccggcaaccgctctgctactggtatccaaccacagcaatcaccgccgccttctttaatcgcctccattgctgaattcataccagccataaacatatgcaattcagcattgcttaattttgacttttttaatatttctcttttcttctcatctactttttcaatgaatctactgacattcatatatgcaattccctcctccggttctcccggaaatcctaattttactcactgtcttcacatgtgcctaaatcgtccagataaataatatctttcccgcactctccgttatctcctcggtaaacacaatcatcattactgcaaacaactattgtttttcccatactatcatccttcctccggcctcccggaaatcttaattctgattacagcagtcatcccccgactcctccacaaggtctctatccatctgccttattacctcgggccactcacacagcccggtgtcctctatctccactggtctccagctacaggtattgcagtccttaccatcatcccccgactgtgccatccttcggcactcctggtagtccttctccatctcgtccgacacatccaggcgcagctccgtatgcggcgccgggaataatttaatctttctcacggttctcctccttcatctcctttataactctgcacactgtcccttcatgcagtcccatatcatccgcaatccaccggttgctccggcctgcttcatgcaacgccatcaccttgcccttgtctaccctcttggcccgtttgggatgaccgtccactgcggacctatcttccacgcaggaatccctggatccgcttttatttttgtcaatagggaggggcatcatctgctcaagcctggaattatccattgctggttcattccggaagaacagacagccgcccagcaggttttgcagtgtatccggtgaatagtcctcccaccgcttcggttccggggtgttcggtgccataatgttaatctcctgccctacggcagccagccgcagggcctctatcatatcaatctgtttcacgaacataatccttaatctcctccagtctgctgactgagacttcatacgcaatccgtttctcacactcggtctcactcagttgcttcacatattccctactctgtacccggccccatgtcctgaccctggcccccacctcaagaccggatacataccgggcattccggccccagctgatgcaaggtatgtaatcagacttgccatacggccggttgacggccagaaggatgtccgcaatctcacgtcccaggggagtcctgcgataaaccggcggcttacagatgtagccatccaggaatatctgatttgtctttgtataatctgtaaattcctccatgaaacggacctcccggacaaaaacggacagctccaggcggttcctgatgccctcatggcggttgtaggaacggaactggccaatggcctccatcgtatcaccggaataatcccggtgtacatccagcagacgctctgacaccattaacggcaggatatccgcctggccactgagccgcttcacagcaatatccaccagataaaagccttctccaaaagcctcatgactaaaggtaaattccgatacaatctcaccaattacacttaccttgttgttttcaatcattttttctgacatagtacatcctatcctttcttcaccttctgaatctctttcagtttctcaatcaataatccccggtttgcctcacaatcccggaagaacttcccatcccgcagcagatagtactcatgccggccgtaaccatcatgatatttggcctcatagcttcctgacgcatatccatcgaatatccttgcgtgatacaccttgaccaccatgctggtgccgtcctccaggtcataccggtagtagcgctccccggtctgtttcgtctcaatccataacggccacgtcacatatgcatccacaaaggcagcccgttggtcattgttctttagcaccggcagttccggctgctctggcttcggcggcggattcacgatgtcatccaaatcgcacacatagctggccagggcacaaacctttagtttcaaccggcggatatgtatgtcattttcatccacatcacattttagcccatcattaagcagctttttggcacgctccagttcatcctgggcaatctgcagctcggtcatgggttcctccggggcccggatgtcctcctccgtttctgaaatctccgtgaattcaccatcaatcacggtatcctgggattctggcataccaggaacatcgttttcatgttctgatgcctcgtcctcagcacttcccaagaggctgagtaattcctttacgtacttcccccaggtcaagctcagaaatgtctcgcacatattatcctggaaatgaatccgttccgggccgcattgataaaagccgtactccgttgacccgctgttatgaggttctccgtgattgattatcaactcctgcctcagcagttttgcgttctcgtcattggcggcctgcgcacacggcttggacatgtgatgctgatagaagtccagaacacattcctcctgggaagggatggctgtttttccctgttgcacatccgcggcatccagcggcggacaatccggctctgtctttgggggttccagatgctccgggcgccgctgcgaactataacattccaactcacagttaccgcgcctgacgcattcccagcagcacacccggctgcagtcctccccggttcccgggatgagcttatgggcctcctccagggtgcagtcaaattctggtcggtggatgcacttcccggacttctctggatgagcctgttctgactttggtagttccggctcaggctccggttcttcatcctgggggcccggctccggttcaacttgtgacgtcacaagttccggcttcgccttagttccatgccagtactgatactcttcctccaggcgggcattctcgatatcaaaaactgtccggcccgaatccgggtagaaaactgtaacatcctgccgtttaagcactttgtacaccaactcaaaagctgtcacttcacactctttttcgggcctggaatacccggcatccaaatatgctcttacgaccgcagcaattgtagcgccataggcattgtcaattgtcctgtttccggctgtgaaatgtattacctccggctctctttcagctccttcatccagttgcgatgttacaactttcccgctcagccctccctcatgttccttcggctctggttgcaatgtcacaacttcctttacctgctgaggttccggcttccggatagcctgcaactgcttcactgtcatatccggattaaccagggtccgctgttcttccgtcaggtaagccagctccaccagctgggagaccttatactccctatactcctccgccagcaccgggctgttcccgtccttactcaactgatcattgaccttgatgcaccggctggcccatcccttatcccggtcatatttgtcacggacgaattcctcaaaattctgatatccggcctcctggaagagttttctgtcccggatggccttaagataaaacccaaccgctatgtaattcctgactgaggcccacatattggtttctataccatccatggcctgtgccaggctcatgtcacgttcataccattgcattacttcattcatcgcggtcctcctacttcatcgtctcatacatccacttcttctcattccactcaactgccaccggcgccccgcagtcatagcagtccacgtcaaattcagtctctgtcatgttggtcagatacctggcctgcctgccgcattcacatttcatgtacagcggaaccatacgctccatccttgtcacggccccgcattcacaccggtaatgattcagccgtgtcttggcacagaatcccctggtctttccacaggcagggcatttcatgtacagatacccgccataccctgcggagatgatgttaggcgccggttctccgccttccttttccggaatctctgccgcttccaccactgtctcagcctcctgtccttcctgacctggatagactgtttctgtcgattcctgaaccggtgccacagttacgccttcctgctgtttctgtcccctgctcccaatcagccacagtgattctgccaatttgcggaacgccgtcctcgcctggccctcatccatgtccatcaccatatatgctcctggcattgatatcctaactttcatcctgttctctccttcccaccggcatgcatccgaaatgaatgtgaagctccgtccgccgcctagtcttgatatacacatgatccccgcttatctcctgtccgcactggctgcagatatagaccttggatttttcagtttttctttctttcactttagccatcagaccgtctcctcttctgccgcatccataacaagttttcttaattccatgacactaactatgacactgccatagcactttttctgatacacagcctggctgattgattcacacaacccagaatctgcaactgcctggttgattctctgcaggctcttctcttcatccgaccgttttatgtacagattcctgtgtactacttcatgaatgactgcttctgtcattttcttgagttcctgccgcaggctgttgtatgctgttctgtgttttgtccggaggatttccagcggcacattatcctcattcttctttagtttccacagtaaatccttatacctctggatatcaatgctgttgatttctggtatttcatcttccacaaaggcatcccagaacataatccattccaggtcagcaaacctatccacatcctgctttgtcttgaaatgcggataatggccaggaacacgtctaacaccaatttcccatatcttcctttcggcatattctcttacttcgtccgtcatgatttcctccaagtaaccacttttcatggttacagtaaccatctttttatactcattggataccgctcaaaccctcataaaataaggctttgtcagccacggtaaccaaagtaaccatgttttcaggttcccttacgcgcgaggcattttttctaaatctttgttaaaatatatacaaagattgtaaaatattttttctgtatatagataaggttttcggatggttccatggttactcacccctaaaaacacccgcaaacccgcatgaaacctagctttttgcggtaaccatgccttggttactccatggttcctgtcagttgaacggcagccgctcctggccgtcatcctccaaccttataaaaccatccttatccgtgttatcattcagttttaaaaaaatgcagcgtatcttgtttcctttaaagctcttcgtcttatccattcgtttcccgctcccatccgcctggatgatgcccttccggttagcccaggacaaaaaggaagtgcgggaaaagccaccctctttacacaaggccgtaaaggccgcggcatagatgatggcatatccattctcaatcgtgccccacttttccacgttctccaccttgtcatcaaacctagccggattcatggccaccttgtccaggacgaactggtaacatctctcattatcagaaagctcattgcggtctatcaagacctccttggcctcctccaggcttatgtactgggcatccttaaatagataatccgttgccagtttatcggctgtcaggatgatagacagggacaggctctgcttctgcatcttctcatcatcagccagtagttccataaagccttgctggatttctttaatcctcgtaaccccaaggtcttttatgacatccacaaactcttttccggcaaacccataattccgttttacaaactccgccacctgaccagggctggtaaatacattcgcaccacattctagctccaggatacggttgattgcaccgccctgggttacatatgagctcaggggccgttccccatttgttaagatacaattcttccagtggttctctcggttcagccccagctccttgttggaacgggtctttccttttccggagcacaggtcatacaccaagccctcaaagttatcttcaatcttccggttctttttggatgagtcgtccagtataaggggcaggttattaagaaggtcacagatggcctccaggcctacctctgtccccttataatcctttatataagcactctcgtccggattggcccatatggaagccgctaccatggttgccacactttttccgccttccgattcgccccaaaggtctacaaagtacggcagaccacccaatggataaactaaaacactggaaaaagaagctgccagcataaatttaatttctatccggccagactttcggagccctgagatatactcataccatcggttccggtttcccacctgcgtgacgctttccgatatctgacgaaatttcgcatccccatcaaatacaatatcgctatcatagggcaggaatccgccccgtatccaccccagtttggatgtggaatactgcactgcgatgtgttcctcgtttgcgttctccacatccgccaggtaccgcaccaggtattttgcgttctcgctggtgaccgctatcccacggcctgacaggctcactatcttattggcggacgtaaccatggtcttaggcacaatgatttcgtcccaacgcccgttgcgtttgtaggccagctttatctgctcctccccagtctccaggttcttcagccgctcaatgggcaggattggatggtagcaggccaggatgtccgtgtatcccgtggtgggattccgaaggaatatccctccctcgccggcaatccactccttacactgcatccggtcatagggtccatcaaaattagtccattgctccagcgtgcagggctggtttttcttatcccgttcccggcgccgcatctcccgctccacacgtttataggccttgaccagttcctggaacttctttttcacccccagctctccggcccggtcctccagcgacagcagcagccttgacttgtacagctcgtcctcctggtcaaacacctctgtcagcacatcatccgacaatactgtctcagccgtcagctccttcaacggcaccatgctaccacctcgcttccaatccgcttaactccgcctgcacatagagctgatactgcagggcattgtaacagtcacaccacacatcacttagcggctctgaacgctccatataggcccggtagacgcttacgagcctgttgttcagccggcgcttctcccgttcccggtccgcctctttctggcgcatcgcgcgctgtttctgcgcccggtaaaccgccagccggctggaaaatgtcggcttctgatattccccgccaaggctcatgaatgcctccttgaaggagacctcatccatcctcatgataaaatcaaagatatcaccatgggcgccgcaggcatggcaatggaagtcccggtcatataccttaagggatggttcccggtctccgccatggaagggacagtggatgaagccggcacggttgggctggaacccataccgctccaccacatccctcatgctgtatgttgccttgatttcctcactggtcatggctatcaccgcccagcagctctataatccgtttcccggtgtccttcttctcgcagaacaggaaccggcagccatacttgcgttcaaatgtgcatagaattttataaagcttatccccggttgttgccttcgtctcccgctccatccatctgcctgtatgcggatccttataccgttctacccgtctgggattcctccaccatatcacatcctccaggcattcaatcccccggccgtgttcacacagtatgatgatttcaattccatgttccctggcccgcagaatttcatcgcggaaccggttatgcccctggcagacgttcccgcacagctccgtcagatcctgtttccggtctataatcaaacggggattatcatagttcatataatccccgacatataactttgatacgaaatggtccacaccccggcggtcaaactccgccacaatcttccggatggcccgggccttctcgcgggaatctatttgaatattcattccaatacctcattcaaccgatttttcaatccgtgcaaaattatgtaattatctcgcatccgagccgcttccaatctgtcttctgactttcccgtataaacacatttcccgttgactttaattctgccataccaaaacttaccagatgagtgcaggcatataccaatcaggccgcttggattgcgtgtccttctattcatattctgtacagatttatccacccatctgcaattaccaggttcatagtcaccatcattatcaatccaatccagggataggttgcattgatacccagttgtaccagcccaatgataaaaagttatgaaatcatcgagccagtccttacatattgtaattccacgtccaccataatctttataattgtgggcttttggattattgcatctgctacgcatatccctccaaatcctatagattcgtgtatgcgtcatcccatgcgattttacccaatatctctctttgcgtttcaagcaatcacctctgtctaattaaacggcagtccttcgtcctccactccatcaggaatgttcataaacccatcaccaatcgcaccgacaggggcctgtctctgagacggagctgcctgcgtatagccgcttcctgtatcagatgatacgttcctgctgtctgcgaattcctggtcatccagaatgacatccgcggtatatactttatggccctctttattcacatagctgcctgtctgaagccttccggaaacaaggacacgcattccctgacggaaatacttctccgcaaactccccggccctgtcaaatgcaacgcagttaataaaatctgccgcctgatcgttgtcctggttcctgcgtcctctccggtccactgccagcgtatacttcgcaatcgtcatggagcgctcgccctgcgaatatctgatttccgggtcccgggtcagccttcccataagaatcactctattcatttttcgattcctccgactcctttttcttgtatagttccagttttcccatacagtccttgtactggaccacgttcatttccgctatatccttaatgctgtacattttaaggatcttctccatttttaatcccttggcactgtatttctccaccagggacttcacagactcaatcatggccggggttactttatccaccccttcgttctggtcaggctgtgatgtggatgttccattctttgcccctgccggcttctcattttcctgttttccggatgtctttgcgctgccctttgcgcccttggtggacgtctgcccttttccggttgtattatcctggttgtccgcatccttcacatcatcaatgcagaacaggccattcagggcatatttcctggcatagctgctggtgctccctgtcacctgtgacacatccattcccttcttttcctgttcctccctcgcataggccgtgttctccacggtctcgccggattcacagtccacaaaccgggccgtggccctgatgtaataccggtccccaatcataaccagctcgtctccgaccaccagcgccgcctttacctcctgaaggaggggcttggccgcctcctggatatcctcacagttccggtaatagtagtttccgaacttgttatactggctcttaggcgctttcaatccggactggacatgctgcagtttctcatatacattcatgttctacgcctccttatcatatacaatccggtccaggctctgcatgataatcaggctggcaatctgcttcattgacatctggctttcattatatatttccaccagggcgttataggcctccggggtcagcttaatgaccggctgaccttcctgtaccggctgtcgctttcttgctggtatatgtatctttccgtcattcattgtctgcatcccctttctgttcttttaccggcaggcgcaaaatggtttccttaatctgatgaattactgaacgggactccatatccaaacaaccggattcaatcgcaattatctttcccaaaagttccgtcctgtctatcaatatctgcttcattcctccaggaacacctccgcttctatcagtgccgtctcctccagcacccagtcatacatctccttcttctctgtactggctgcctcgcctgcccggcgggccatccgctcccggaagaggagccagagatgatggtacttatcttccatgcttactctccttcccggccataatctcatcaatatgttccagcatgtatgtgttcgccccatcccggaaggcttccatgaatttccccatggccttacaagcccccttcggctgctcaccatgcagtttgattaacatatccttgacggaccgggccagtatagtcacagcgtcccggcggctcatcttatcagcaagagaaatgttttgtatgcagtattccgtaccaatcagcgattcctccgtctgtttcgccgcaataacaaacaccgcattgctttcactaatccggatttcctccaggctcccttcaaaatcatgactgattattccttttatcatcttgcaatctccttttaaatcccttatactaagggtgattagattttttaattacctggactttggacggctccacccgtctgaggtccatcttcatttcttccaatatctcattacttgctgcctcggcccccgcctcaatcctatctgcgttaccggtcataacgacaccagattggaccatggcctgtatgatgatacctttaataacttgtctctgtattatcctcatctcctctcaaagtctcacgcccatggccagcgccatgaccacgatagctaccatccacatccccagcagccagataaccgccggtacaatccacttagttgccctcatgattgggccgtcccggcgtctcctgcgctgtcggaaggtcaccatacgcctgtgccccatgatattggtcatcaccgcagtggccggtcccacaaaatccacacgccagccaggatactggaccgctgctctggcgcggatgcgatgctccgcaaatgttttagctctcattggcttgtctctcctttctatgcttgtcctccatggccgcccttaggcggtctttctcttcctccgaaatcccagtggaagcatcagattgtcctgcagcgcataggcaatgcgccgtttttcttcatccgtcagtgattccattggaacatcctggccatcaatttctatgtatttgaatacttttaatttctgcactatcaccacccctccctgatagattgtatgcggtaccggttgtacttgtttccttcctctcatagtccttgcacggataccaccgtgtccgttctgggcactggctatgccggcgggtcttgcatatcgcgttgttatataccgcctccctcgttacgttttatccccctcctttccccataatcccattgacacataggttcgacagtgatatagtttagtcattcgaacaaatgttcgttttttcttccttagcaaaaagtgttgtaattggaatgtcaggaaaaaactcttctttcactttggctgcctcttcaatggagaacgaaccttctcgcaatttataagatatggcatttctatgaagccctaagctctttgataaagcttcacgcgtaattctacgtttggccatttctccaattaaaaatgggtatgacattatttcacctcctgtttttatgcgtttgaataacttgtattgccagtatatatccattcgaatatattgtcaacacattttttattcctttgcataactttttgtttactttattatttaaatatgctattctatatttagattgaaagaggtgaaaatcatgggaattggagcaaaactggatagtcttttaaaatcacagggatctaatccgaacgaattggcccaaaaaataaatgtgccagcacaaactatttattcgatgataaaaagagacagtaaaaaggcagacattgaggttcttattaaaatttccaaagaattgggtgtagaaccagaatatttttgtaatgattctattccagcaaaagagcctgcttacaatgatgttatcactgtctacactcgtagtagaaagaatctctctcaggaagaaaaaatgagacttgctcgtatcatattatcagatgacgacgaggagtaatatcaaatggattatcaaaacctatatgacagtattttatttgcatatatgttttttggcattgactcatttccaatagattgttttgatttagtacggaagtgcggttttagaattgttaaatatgcagacttaagtaataaaaagaaaatagcttgtcgaacgcttagcaatgatgcttgctttttggatggaacactattttatgaggctcaagcccatccgcagcgaatccagttcacaattgcgcatgagtttggtcatattttcctaaaaacagataacgaagatgcttgtgatgactttgccagtcactttttggccccacgtatcctgatacataagtacggataccaggacgcagaacagctacatgatgctttcggcctatcctataaggcatctaacagagctttgatgtcctacaaggaatggttccgcaatatctcctacagcgcaaccaggaagcccacggaaccggagcaacaactggagcatattttctttccagagccaaacttgattccgctcatggaaggtattgttcaaccggccagagaatgctacaccgaaaatgacgaggatgaactggatgaacgttctaattttatgaagtttttaggcagatggcgcggggacctgggatttggaattgctgaagataagtggctttacggaaatgatttataaattagcataggagacaccatatgaagctatttagattttttaaaagaaactcaaacttaacaatagaaaaaggggctaatgacataaatcaagaaaatgcacaagaaaataaaacattgtctaataatggacacattagaaagtcagaaaatccgagatatacacaagagcttttatctaatgggaatactgaacagcaatgtaatgattataatgtaaaaaacggaatttaccctgtaaatacaccagttgtttatggtatgaaattaatctcttccactgtacctccgcaagataattactgttatttaaacgaagaagaaaaaactttttttcatgtatttcaacaaaaattgattgaagctacgtataatccaagtttagtacagcttacacgattatctgatgggacatttaatgtagattatattggcctgtgttacattggaaaaatatgcctatataaagcacccactacttatgcggtaattaaaaaaggcaataaacgtgccactaaagtcttcacttcttttgacgaggctagaaattttgcttctaccaatagtgcttttgaaatccaagaaagaacacttgagtctaatacttatatgcaatactccataggcataacttctgttaaagaactacataatccatccctacaacaatgtattgatactatccccagatggattaaatacttgaattattgtaaaagaaactaaaaacaaaaagccccagaagctacaaatcccggggccactcaccctgacaacataatatccttacccgggcagctgggagggcgtgcgtgccattcgttctgagtcttgacaggaaggatggttgcttatgagtacatatgaggaatttcagattatattaggcattgccttgttaatcgttgcaatcctgaacatgaaaaataagtaagccgccctgctccttggccggatgggcgacttactaaagttgttataattcgccaggacggataggcttaatctatctcccggctgtcttgttaagtatattataccaaatatacggaaattgtcaaatgtgaaaagcggccctgttaccagcaggaaccgccctcacatagttttctcttaccggatcgccccagcaagatataattaattaccttaagcaagtaaattatatcattcctggagcatcctggcaaggggcgtattttttatacccttttttcaaagctcaccaaaatcttacaggctgtaatatgggttataatatgggccgaaatgtggattgaaacgtcctccaaactcatatacatgataggaacaggagatgatataatgccagcaacaccactagaaatcggcgccgcctacgttcgtgtcagcacagacgatcagacggagctgtctccggatgcccagatacgcgtcatcatggacgctgccaaggcggacggttttataattcccaaagaatacatatttattgagaagaaaggaatctccggccgcaaagcagacaaccggccagagttccagcgcatgatagccattgccaaatctcagaagccggcgcctttcaaacggctctatctctggaagttctcccggttcgccagaaaccaggaagaaagcaccttctacaaaggcatcctgagaaaaaaatgtgatgtagaaatcaagagcgtatcggaacccatcatggagggcatgtttggccggctaatcgaaaccataatagaatggtttgacgaatattattccatcaacctctccggcgaggtgttgcgcggtatgacggaaaaggccctccgtgaaggataccaggccaccccctgcctcggctaccgggctgtgggggaaggcaagcctttcgccgtggaggaaaaatcatatgccatcgttgaatatattttccagacctaccatagcgggaaggatatgaccgccacggccagggccgccaatgccagaggataccggacccgccgcggcaacctattcgaccgccggggcattaaccggattcttgccaaccgcttttatattggcgaggtcatatggaacgggtattccttccagggcacccacgaggtacgttcctccgttacctccctatttgacgatgttcagaagcggattgaaaaggaataccggccccagaaacgccgggaggtttccaacaatgtccactggctttccggtctgctcaaatgcagcatatgcggcggcagccttggcttcaatcgttccaatgaccagaagaagcggcctgacttcttccagtgctggaagtatgcaaaaggcatgcatccgggctcctgctgcctggccgtacacctggcggaaaaagctgtgattgaatctctggaagaagtccttgaaacaaatgaactggaatatgaatacatccaaaaaaccgatgatgctgtaaacgcagaagaaatcgtcattcaggaggcccttgcccgcttagaagtcaaggagcggcgtatcagggaagcttacgagaatgaaattgacaacctggaggaatataagcagaataagctccgtctgagggctgaaagggaagaactcatggctgatgccgaaagactccgcaggcaggcagaacagtctcctgccaaggttccaagcaaggaagatatcatgcgccagattgcgcatgtgcatgagattctggcagaccaaaatatcagttatgagataaaagggaatgccctccgcaagatagtcaaagagattgtttttgaccgcggcaaagggcatttacatattcatttttatatatcataggttattgcagtccggcccaccatactgactcattataaactgagccatctgggcattgggctctttgatattaactggaaattccaatctcttctcataaatccacattaatagcaccctccttcccatggccacggatcgttaatccaggaccagtatgcagcatctgtattagcggaagctgtcaaaggtccaaactgcgcctcaaaggctgcggcggcgtttctgtatgcgtttgccatctgattatagtaatcaatggcggctgcgtcacatggatgggtgtcaaggtagaggttggcatcaaccactgcaaagccggcctggtccacttcacgaagcatggcctcacgggaggcattaaagtcgggattcatcatctgattcatcatcttccgcacctcccgtaattaaactgtaaatccaggtcagggaaaatagtcccctggacaaggcctctttcaggggcataggtggtctgccactgctgccacggtacataagccatggccaccggaaactgctgttccagcacgcctccctctgtggagggacacgacatattggctggctgagtgactggggctgcaggtgtaggataggaaagcgcaggattgcttccccatgagtcccatgggaatgcgttcatgtccggataatccggacttgtataagaaccgcatccatttccaaacgatgtaccgcaagacatgcggccgcggccgcagcactgggtacttacatctgtataagaatccataggttggatactccttccaattatctttttctactatagtttatgagaagaaaaacaacgggtgacaataaaatacattgagacaatcactcacactttgtctgggcgtcccatatgatatagtacaaaccaacaaaaaaggagagtacaatatatgtgttgctttagactttgtagatgtggatggaatcgttgtaattgtggatgtggctgtggctgtaacaacagtggatgtggatgcggcagcaacagtggctgctcttgcggcggcagtaacagcggatgcggctgcagcaatgacagtggctgtggctgtggatgcggcagtaacagcggatgcggctgtggttgctcttgcagtggaggaaacaacagcggttgcggcggccatgatatctgtgcaggcgccagacgccaggcatacagggaaggcttccgcaatggctattgggaaggcttcaacgatgcaacttggggcaatccaggctgcggcggccccaccccccgcacggccggaggacctggtccagctatcgccgaaaacagctgcggctgtaacaactaatagaaattggcaaacaacaggtatacggaacagggcctcctacgaggccctgttttgcatcttctctgttttgcatctgctcttttttacacactctttctttcctaatcacctctacatcacagacaaccattgacaatcttcctttttctggtatatagttggcttatattcactatcatttcatacatagaaccacaggaggttttccatatggatgcacaaaaactggaacagatacagaaggtctttgccaacgaccgtttcgctacggataacggggctgtcattgagcaggtggatgagggatatgcaaaatgttggttggaaatacaaccacaccatcttaatgcagccggcacagtcatgggaggggccatctttaccttggctgactttgcctttgcggttgcttccaactggaacaagcccctccatgtctcaaccacatcccagatcacctacctgggtgttgccagaggcacacgcctcatagcggaagccagaaaggtaaaggaaggacggagcacctgctactatctggtggaggtgaaggatgacctgggcaatgaggtggcccacgtaacggccagcggtttctccaaaggatagaggaatcaatcacccgcatcctgcgccttctctccaaatatgccaagccgtatttccggggtatcaggcagcaatcatgcaaaggtgccgagaaatcatctcaaatgatggtttctcggcacctttatcttacctttatcttacctttcacacactatccattatattccggtcataccagactaccagcacatttcctcattactgtacagcaccaatccgccgtctgtcactgccctggctgccgtctctccgtcagatgccttcacaatcattgccctgcggttggcggaagccagtgcgtacatgtactcaatgttcagcccctggctgcagaggatatgtgtcatcttgtgcagttcccccacctggtcctccagttttactgccagcacatcggtcagcatggccgaaaatcctttttccctcagcgctgcctttgccttatccggatcagacacaatcattctcagcataccgtactccgtggtatccgccatgctgagggacagtatgttgatgtcctgctccttcagtacttctgtgacctgctccagtctgccttcccggttttctataaatacagataattgttttacaaacattcttgcaccccgccctttcttaattcagattcctcttgtcaatcacatgcttcgttttgcccatgctccgctcaatgctctttggctccaccagctttaccttcacagccagacctatggcctgctgaatcatataggcgatctttcctgtcagattctccagctcccggatttcatctgagaagaatcgctcctccacttccacctgcacctctaaggtgtccagattgttcacacggtccacaatcagcaggtaatgaggcgtggtgccgcccatttccagcagggcagactctatctgggatgggaatacgttgacgcctcggataatcagcatgtcatcggtccttcctgtgaatctggcaatcctggccgtggtccttccgcactggcaggtactgtgatcaaggctggtcaaatcctttgtgcggtaacggattaaaggcagcccttccttggtcagggtggaaataaccagttcgccggtcatgccgtctctcagcggcttcaatgtattctggtccacgatctccggcaggaaatggtcctcatggatatggagtccctcatggaactggcagtctgtggcaacgcccggtcccatgatttcgctgaggccgtagatatcgtgggcgtggattcccagctgacgctcaatctgggttctcattttctcagtccagggctctgctccgttgatggatgccttcagtttaatcttatccttgacccccatctcctcgatggtttctgcaatatgaagaaggtaggacggcgtacacatgattcctgtcacaccgaaatccaccatcatggtcaccagcttcttggtgttgcctgtggacatggggaccacggtggctcccatctcctctgcaccatagtgggctcccaggcctccggtaaacagaccgtatccgtaagccacctggatgatgtcattgcttcccagtccggccatggtaatgcacctggccacgcactcactccacacgtcaatgtccttgcgggtatatcccaccaccgtggactttcccgtggtgccgctggatgcatggatacgggtaatctgggaattaggcaccgcaaacatgccgaaggggtatgtatctctcaaatcatcctttgtggtgaacggaagcctttccaggtcctcgattccccggatgtctcccggctccaatcccactgcctgcattttcttgcggtaatactccacactgtggtacaccctgtcaactaattttctcagccttgcgctctgcaggttggtcatctcatccctgctcatgcactcctttgtctcattccatatcatttgcctgtaacccctccaactctcacatgacatatttttatatcccttatctgcttacagtccactctccggtttacttcccggcttctgtccgactggcttctgtttgaccggcttctgtccgtctaaacagaaagcgcataaccggtctcaaatgcctttttattaatttccaccgtcttaggcggaaccgttgtctcgattaccttcagccagtcttccttctcaaatcccatgtgctttgcagcggctcccaggacaatgacattgaatgccttgggcgcgcccatctttttcgcttcctccgtggcctccaccacaatggttctgcgggcttcctttaaccggtcaatgattccttccggatactgagccacccctgtcaccaccgtaatgggatcaatgcgccagtcattgacaatgaccacgccgtcttttttgaggaaatgcagataccgcagtgcctccagacgctcaaaggcaatcagcacgtctgcctggccttcctctacaatgggttctgccactttttctccatatctcacaaaggttaccacgctgccgccgcgctgggccatgccgtgcacctcggacaacttcacgtcaaagcccgccccgattgcaagctttccaagtatgcggctggtaagaagggttccctggccgcctacgcctactatcataatattctttgatgtcattttattcacccgcctttaccagattgattgcgtcaaatttacacagctgtttacacagtccgcagccattgcacatggtctcgtcaatggatatggtgccgtcctcattctttgtcagggcaggacagcccggtcttaaacaagctccgcatttcttacacttatccggcagcggcctgcacttgttggggaatttgattcccttaagcagggcgcagggcgccttggtgatgatgacggataccgcatcccttgccacttcctctttgattacgcgctccagctccgcctggtcaaaggcgtccacctcgcagacatgctcaatgcccagtgacttgcacagaccgtaaatattgatggcaggaaccacctgtcctttaagggtcttgcctgtggcggcatgatcctggtggcctgtcattcccgtggtggaattatccagaatgatgactgtgccggtggcctggttgtagaccatattcatgagagagttgatgcctgtgtgcatgaaggtggaatcaccgattacagccacccagctcttaatatactctcttccctttgccttctccataccgtggagagtgctgatgctggctcccatacagatcgtggtgtcaatgacgcttaagggcgccactgcccccagtgtatagcagccgatatctccggcagcatgtatcttcagcttgttaagcacagcgtatacgcttctgtggggacatcccggacacaggatgggaggtcttgcaggaacctgggccgccttatccacctgtgatgtctggcccaacacacgctccctgatcagatttgcgctgtattcaccctgaaccgtgaatatttccttgcccactgccttctgaatgccccaggatttaacctgttcctccaccaccggctccagctcctcaaatatgtaaagcttatccaccttggccgcaaattcctcgatgagcttccttggaaggggattgagaagccccagcttcaggacagacgcctgaggcatggcttccttcacatactggtatgcaataccgttggtgataaagcccacggataaatcattgtattccacccggttgatgggaaggctgttggcatcctctgccatttgtttcatgcgcgcttccaccaccacgtggcgtttgatggcattgccgggcatcatgacatactttgccatatccctctcataggggatgtcaaagggctctgccctctcctccagttccaccagcccctgggaatgagacagacgggtggtactgcgcagaataacaggggtatcatatttctcactgagatcgtaagcatatttcatgaattccttggcttcggcactgtcggagggctccacaatggggaccatagcagccctggccaccatccggctgtcctgctcgttctgagagctgtacatgcccgggtcatctgccaccaccagcaccagtccgccccgaacgccggtgtatgccgccgtatatagcggatccgcagccacattcatccccacatgcttcatgacgcacatggaacgcacgcctgctatggatgcaccgatggccacctctgtagccaccttctcgttgggagcccactccgcgtaaatctcatcgtactggaccagagactcgctgacctccgtactgggtgtgcccggataggctgcggatacctttacccctgcctcataggcacctcttgctatggcttcattgccaagtaatattcttttctctgacacgttttttccttcctttcagtatgtattaactgcaccggacctcttaataactgtcctgatgcctcatcagacttcctttcgcaggtccgtgaccctctttgcctttccctcaaaccgctgaagggtgttgggggataccagctgaatcttggcatccagaccaagcatcaggcgcatcttatccttcaaagtgtcctccagccgctcaagggcagcataggagtccatcatactctcagcttccacctcaaccttgataatcaggatgtcggagtggttcttcctgtccaccacgatttcatagttaggcccgattccctctgtattaatcagcacttcctcaatctggctcgggaatacgttgacgccccgaatctttaacatatcatccgtacgtcctgacaggttctccatcctggcggtggtgcggccgcagggacagggttcatacattagcctggtaatatccctggtacggtaacggatgagaggcagcgcctccttggaaatgcaggtgataaccagctctcccttttcgccgggaggaagcacttcccctgtggcggaatctattacctccgcaataaaatggtcctcattgatatgcattcccttaagttccaggcattctcctgacacgccgggacccatcagctcgctcatgccgtaattctgggtcaaattcacatcctctccccataccttgtaaagctcattcctcatggcctctgtcatcagctcgctgcccagtacaagggtctttaccttcaggtctttcctgggattaattcccatctccagagccacctcagcaatgcgcatggcataagagggagttgccaccagcagggtagtctcaaaatccttcatatacatcagctgcttctgggtattgccggtagaggacggaaccaccgcagcccctaccttctccagtccattgtgaagtcccagggcgccggtgaacatgccatacccaaaacaaatctgggcaacatcctcgtccgaggcgcctcctgccacggccagacgggccacacattccttccacacctccaggtcattctccgtataacccaccacagttggctttcccgtggtaccgctggatgcgtggattctgcgcagttccttctttggaaccgcaaacaggccataggggtaattgtccctcatatcctgtttcgtcacaaacggaagcttctgtaaatccttcagtgtctgtatatgctccggccttacacctgcctcctccatcttggcgcggtatgccggtaccttttcataaacccggttcaccgtgtcttttaggcggctcagctgtatcgcttcaatctccgccctggacattgtctcctcttttgcccaaatcatgttgtctgacctccctttccctgcccccgcatctcctgtctggtttcctgtactatcttactttgacgtgacaacgcattggcgcattatattgtctggcgacattataccatcttttcccgggtttgtctgctgttttcatgcaaattccatatgagttttctgtttgcggtttttacaccggaagcatctgcacaaaacctaacagcatccatagctacatcttatcacagtttcatgacttaggccatattagggctcatattaggacagggacatattgaccatgtccctgtatattaacagggaaccatgtctcccgccttatggcgttttccatggttccctgcaatcgcacagccctcaccgtgccggaccgccctgtcccgctacaccaggactccctcctgactgcgcagctttaccaccgcggacaggtccgtctttttatgttcctttccgccctggtcctgacacttcttggaacgttcctcggcggtttcgcacttctggtaaaaatatttgataatgtcctttctggtaatgataccaatgaaactcttctgatcatccagtaccggcacaaagttctggttcaatgcctttccgatcagatcctccatatctgcgtctgccttaaccggacggttgtcacaccggcggcgtatggctgtaacaggtatcctctcagcccctttcagatccagattaaactggttcttgattccccataacaggtcaccctccgtcagcgtccccacatagcgacctgtcctgctgacaatcggtactgcggaatacttgtggtgctccattttctccaaagcctgtcttaacgtatcatcctcgcttatatacgccacatcacttttaggagtcaggaaaaacagtatgttcattttttcactcctttttcccgtattcttatttaagtataatgcctgcctctgaaccgaatgtgaacaaattattataaatatctgaaatttcttaagatgcagaaaatacagatatatttatatgtgcattacacctgcaggagccgccgtactctgtctgaccaccaaatacggctgaaacataatatttttctttgtatcctgtttctgtttctggcgaataatccgaatcatctgctggaccgcctctgttcccatttcctccactggctgatgaattgatgtaaggggcacacttaatatctctgaaaaaaagatatcgtcatatccaatcagcgatatgtcctccggaacagagattccctgctgttttagatagtgaaacacaccatacgccgacatatcattataagcaaaaattgctgtaacatcttttttgagcagatattccgccccccgcacgccgctgcttaagtcatagtccccataaaatataagggacggatcaaattccactcctttttccatcagcgcccttatatagccctgcgtcctccggttggaatcagccagatcctttgggccgcccacgcatccaatcctggtgtggcccaattccaacagatgtctggcagcaagataacctccctcatcatggtccacaatcacggaacagcctttgacttcaggataaaagcggtccacaaggacaaagggtatgttgagtgaatccatcagagccaccatttcctccactttttcactgtcattctcccttgccatacagattaatactccgtctacccccttgtcagccagcatctgcagatatttcatctcgcgctcatggagatcgttggtgttgcacagtatgagattccagccgttcctgcggcattcatcttcaatggacttagccatattagcaaaaaagttatttcggatgtcagataaaatcaggcccagggtttttgtctgcttctttaccagtcccacagctaattgatttggacggtaattgagttccttcgcagcctggagaatggcctcttctgttgcctttggaatcttatgtgcctttccattcagtaccaatgatatggtggtaatagaaaaacctgtgtacttcgctatatccttaattgttgttcgcaaatcctgccccctgttaaaacatgctcaaaatcttacatttcattatatcataagtttattatttagcaatgtaccagcaaaatttttccatgactctaattgcctcaaaatacttggatatctccacgtattcattgggcttatgacacatctgaggctctcccggaccaaagagaagtgccggactgtccggccaggctgtcaggaaaatggaagcgtctgtaaaatagttgataccggtctctcctgcatcgtcgcctataaaccctttcagcctgtgaagccactggttttttgggccggtctctaccggcatcctgtaatttgatatttcaggcgtaaaggacagacctccgttataaacttcacaccgcttttctataaggcattccagacggttcagaacctccttttcatttaaaggcggcacaatacggatatcagccagaaactgcgccctgtccggagtcatatttggtgcaattccaccctccgccatggtaacctggagtgtgctgcgtcccagcacagggtgttcctccctcataagctcctctctcaaatccgcaaacaggccaaatccctgctccagggcattgattccctgccagggttctgctccgtggcttgtcttgcctgaaacagatagttttaaccagatacatcctttctgggccacaccagcctgacatgaagtaggctctccaattaaaagcagctttggaaataaatcaggatactcctttatgatttcctttgcgcccaaaccgccacgttcctcatcacaggttcccgcaaaaacaattgttttctgcgggacgcatccgctctccgccagctctcccagaacaaaagccatgactgccaatccgcttttcatatcactggcgcctcttgcataaaggcgtccatcctgttctgcgcacacagccggattggtattccattcgtttatatctccatatgggaccgtatccagatgtccgttaaaaagtatggtctcttctgtttttcctctgagcacgccaatcacattgccgtgatgctcgtcaatcagctgaacccttgtttccataccttttctttttaaatattctgccagataaacagctgtctcctgttccctgtcttttccgttaacactgggtatttccagtatgctcttcaataacgccagagcctctgttcttttctgttcctctgttcttttctctgtttccatctgcaatcctcctgcaaaaagaggactgccgcccatggaatccttgatttcaggcagcagtccccatccttattcttactttgtcagccagttcatgattccctgccacatcctgttataatattcccactcacagaattccggcggtgcccagtgaggggcgcagtccgtggttactacagcgctctttccctttccatattccccaaaggcaataaacggatcatcatctaccacagcggccacaaccgcttccggctttgcaatggtcttgttatatcccagtacctgcgggaactccccgggaatcccgttcagggcttcatgctgaacaactgttacaggtgtggttccctcgcagtgttccatacggtcatccacagtaagcacctctaccggcagaacctcctgcaccgcagtatcatgccattttccttttgcatccacgcctgaaaaggtaaggtagcctcccaccatcataagggctcccccatccagcacgtaatcgcgaatcagattacatctgtttggcttcttctcgcttctcataaatgtggcagagggaagaagaagcgtattggctccaatgtcagagagaattactgcatcgtattcctttaattcttccattgtaaacggaaattcctctcctgccagatggttaggcataaaggtaacctcataaccgccttcttccagcgctgctttcagccacttttctcctgtctcgtatacagaggtataaaaactgtcaaatcctttcacatgtgtagtgtaactcatccaggactctcctgctaacaatactttcttactcatctctcttctccttattcttcattctatttatttgccttacaccattccagtatgagctgggcataaacgagaatggcttccagatatgattctgcctccacgtactcatttacagcatggcactcttccaaccgtccgggaccaaactgcatggtggggcatcccgcgatattcttccataatcttgaatcacagcctgccggagaaccgaccagacgcacctgtcttccaagggctttttcgtatccatccataaagcaggccacaaagctgtcatcagattcctgttcaaaggcccctccggcctgatacatggttatcaccggcctgtgccggcacagccataagtcgctgtcagccacccggttcaccgcatctgtaaactcctctacaatttgatcatagctcatctgtctgggcagataatggatgcatgtctcgaaataacaatgtcccggcaccgttgaaccggcgctgcctccgtgaatcgtacctatattcagattgggagcaggaagcaggggatgtttataagtcagcagccatttgtgttccagctcctccagctcacggataaccttaaacgccttatcaattgcactgactcccttccactttgctccggaatgattggcttttccctcaaactccactttaaaaaagacaaatcccatatgggccagaatcaattcatcggaagaaggctcacatacaaccactccatcggctttttctcccgacatgattgccgccatagaaccattgcctccgccttcttcatcgcagactgaagtgatatgtacatctcccggcagttttatcccggcatccttaagcagctgcactgccataacagatgccataagtccgcccttcatatcagccgcgccaaggccgtaaagcctgccgtccttcatggttggcgtgtgcggcggcgtattccactcattttcatttcctgccggcatggtatcaatatgaccgttaaacatcaggctcctgccgtctttgtctcctttgaaaacagcatacacattatagcggtcatcgtaattatgtccaatgtttccttcctgatatttggccaggcattctttaatggcttcctctgtcataggatcccggcggatgctatccgctcccatatcctcgaacaatttcaccatatactcctgcccctgcttttccagccctcctgctatcccatggcccaaatcatgggtgtcgatagctataaggtccatcaaacgctgtatatatgcctgtttattttcttccaaaacttcttttagcggcctcataatttcaactcctttttcggtcagacatggttgcggcatttcatcactccattaaccagattaaccgtaattgcggattccctgttcaatgatatcccagaacttttccacatccacttccactgccacattgctgttgggctccctcttgaaatatccgaagaagtcacaattcgtacggccgtagctctgaacgctgcggatatctatttccgtaaacattgctttcgttgtcaggactgtcgggtctatcaggtatgctatggtcagagggtcatgaagaggtcctccctcccatccgaatacagctttttggctcttgctgaaaaaccgcatcaaatctgcaaacagcattgccggcggcgttcctatcttttccattcgttcaatcacggacgggtaacacagcacttttctggtcacatccagtcccaccatggttatgggcctgttgcacgtgaacaccacatgggccgcgtccgcgtccgccagaatgttaaactctgccgcaggcgtcatatttcccaactgatagcagccgcccataagcacaatctcacgaatcttaggaagaattctcggttccatacgtattgccatggcaatattagtcagcgggcctgtgggtacaagtgtgatatcaccgtccgatgccatcagcgtatctatgatatacagcaccgcatgtttatcttctgcttttttcctgagaggtgcaaataccggtccgtcaagccctgtctctccatgtatgtcatccgcaataacctgcttatcccgtatcataggctgtccgcatcctgcgtacactggaatatccagccccagatattggcacacatttaatgcattggccgttgttttttccaatgtctggtttccggccaccaccgtgatgcccaataaatcaatttgcgggctcttagccgccagcattatggcaaccgcgtcgtcatggcccggatcgcagtctaaaataatcttgcgcttatccatatcttaacctcctgttattcaatcgtaaccagtgaactctttttcttctcctgggcttttttcttggatatcatggaaactgccagtactgtaatggtcaccacgtagggcatcagcaatacaaactgggaaggaacaccatacgcctgtatacgggctcccaatgaatctgtaaatccgaatatcagacagccaaccgctgtaagagcaggatgagctcctccaaaatacatggcggccacacccataaagcctctggaattcgtcataccctctgtaaaaagctggctgtatccaagggacagatgagctcctgccagccctccaatcagaccggatatggctattgcctggtatttcatagcatttacattaatacctgctgtttctgcagccatgggaaactgtcccactgccctcagcctcagtccccatacagtcttataaaaaagaaacatcataagaaataccagcacgataacaaaccattccgtaacactccagttgttaaacaagctgtccaggaccggcacaccgtctaaaaacggcatatgtaccttaggtatgcctttaatctgcgggctggtaaaggagccgcttactccaagcacgctattaagcatgaacttggtaaaggcaatggcaaacagattaatacccataccgatggcacaaatctctgccttgtacttaatgtgtcccacagccataatcatagcaatgagaagccctgccaccattgaaataaggattcccagaacccagcttccagtcagataactaacagttaccgctgtaaatgcccctgtaagcatgataccctcagtaccaatattaagaatatccgcctgctgggtaatagctgcacatagagctgcatatatgatgggcgtagctgaacggaacgtcgcatatattaatgaaatatcaaaaatcttatcaaattgcatatgtcctcctcctactgcgcatctgcttttgccttgcgttttttattaaactggaacagcaattccatggtagccacgataataaagatagctgtaatggtatctacaatggattttggaacacctgtattctgctgcatacccaatgcaccagagcggagcactgccaggaaaaacgcgatgaacggggttgtaactacattgttcttaactatcagggaagccagcattccgtttgttcccaggttcgtggcaaagttattcaggaagtatccgtatgtacccagcacctcgatacagcctgccaggccgccaatggcgccgctgagcatcatggtacggataaacaccttcttcggattgattccaacatactcagcattggccggattggttcccacggttctgatcttatagcccagcgttgttttgttcagcatccagatgacagcgatgaccgctgcaatagctataaacagcccagcgttggcattacttggtttcaaaagtttgggaagcgtcacattcaccggtatggactggggattggcaacgcctgcactgattggtccgcttactaaataggaagtgatatacaaagccacactgttcatcagaatggtggtacacacctcgctgacgccgtaatacgcttttaagaatcccggaatccatgcccatgccgcacctgctgcaacggcagccacaaaacatgccactaacagcaaaggctttggaagccatgtacagtagattcccacataggcagctgccataccgcctaagaatacctcgccctcaacacctacattgaaagctcctgccttagccgccactgcaaatgcaatggacgtcaaaagcagcggggtaaagttggccagagttgtaccaattttcaattttcccacaaaagcgcccttaaacaaagcagcatatgcctccagcgggttttcatgaatcagaagtataaaaacagctcctatgcccaatgccagaagagccagcagtaaaatcctcctcaggcttttcatcactgattctacttttggattcattgtctgcctccttcctgctcctgaataccgcagccttccatatcatgaccgcccatcatcagaagtcccagcttttcttcatctgcttcctccgccatcatgcgccctgtaatcctgccttcatacataaccacaatacggtcagacagagacatgatttcttccaggtccgcagataccagaagcactcccaggccctttttcttaacatcctgcaaaatagtacggatcgattcaatggctcctatatcaacacctcttgtaggctgggatgccaccagaagttttccgcctatggaaacctctctggccaccactaccttctgggcattacctcccgaaagtgaagatgtgggaatctcagtatccctgggacgtatatcaaatttctcggccatctccttggcaaacgggtaggatgcagaatcatttaccatgattcccttggcaaagggagctttgtcctcctgaactgccaccagattctcccgtattgtcatggtacggtttaaacctctggtatttcggtcttccggtatatgggcaagtccggcttctctggatttctttggagaaaaattagttatttccgttcctcccagaataacacatcccttctccacctttctcaatccggttatagcctctataaactcactctggccatttccatcaataccggcaatacccacgatttcccctgccctgacttccatagagacaccgcgtatcttggatatctctttttcacccgatgtccacaaatctttgacttccaggaccacatcaccgatatcagccttttccttttttatatccaggaaaacttcccttcctatcatcatcctggctaaatctgaaggggacgtatcctgtttatctacggtaccgataaaacatccctgcctcattacggtaatacggtccgatatctccattacctcattgagtttatgagagatgaaaacaatggacttgccatcctttctcaaattctccagaatctcaaaaagtctgcgtgtttcctgaggcgtcagcacagctgtcggttcatccagtatgattacatctgctcccctggtcaatattttaatgatctccactctctgggcttctcccacggaaatctgatttattttcttactcatctgtatatccatgccgtactggtctatatagtgctgcactgtattttttgctttatcaaaatctatggtgcatccctttctgggttcaaatcccagaataatattctccagtactgtaagctcgcttaccagcatgaattcctggtgcaccatgcctattcctttttctatggcaatcttgggggtgatgtggctcatattctcgcctttgatttttatatctcccccgtcaaaatcatatagtccgtacagcagtttcatcatggtggattttcctgttccgttttcaccaatcagggagtgtatttcacccttcttcaagttgaactgcccatcttttaccgcctgtacggagccaaatgatttcctgatattattcatttccactacatatccgttcattccggtcacctttttccctgaatctttgcctctaaagatttcataaaacccggggcgggaagacatatccatgtcctgccgccccttaagtatctccgcgctttatactgccttactgagcgtccttatcgaatccctcatagttatttaccacaatctcaccagaaatgattttatctttcagttcctgcaccttgtcctggatatcagcagggaacttatcacctaagtgctctttaatgactgcgaaatcagttaaatccacaccgtcattggaaacttccagatagctggtggtatctcctttgaagttaccctccactacggactcaatcacgctgtagcaggcagtgtcaactcgtttaaccatggatgtcactacgtgtcccggctggtcgttatcctgatttaaatcaacgccaatcgcatattttccagcttccttggccgcctccagaacacctgtacctgtaccagaagccacattcatgacaatgtcagcaccctgttcatactgcgccaatgtcagctccttgcccttaagagggtcaatccatgttcctgcgtaagactgaagaatggtaatgtcgggattaatatactttgctccctgctcaaatccaacatagaaatcgtgaagcaccggaatgtcctggcctccgacccagcctataatagcatcgtcatttaccccttcaatctcggagtgggtcgtgaacatagctgccactgcaccggctaaaaatgaaccctgattctgagcaaagctgatggaaaccacatttggtccttttacagttgtatcaatgatagcaaatttaacgtcaggatagctgtctttatatttctcaagatattcctggaaattagagttagagcagatgaccaaatcatatccgccctcgcagcatgccagaaggttggcttcccactcgtctgcggtagtgccttccaggttctttacctccacgccaaaatccttggctgcctgctgtgcacctgcattacaggaatcattgtaggatttgtctcccagattaccagagtaaacaacagctacctttatgggacttttgccctcagaatctgctgcctcgccggagccctccgctgcagtctgcccgctgtccgctttgctctctgccttagctcctgtgctgctggaaccacaccccaccagacttaatcctaatactgccgccatcgtcattgccaaaaaacgtttcttcataataaaactactccttccttcacctaaaatataattgtttccttttaccaggaaaaagcttttagtaaagcttttttccaaatttatttcgtgatttaatcttattactattttttaattttgtcaatacataaatattgcactatattgaaaacatatttttatgcattatttacagtttttatatgtgttctgcccttatgttctgattgatattttcttcgatggtaaaaggctttatcttccctgatgctgtaaatcccagtcagatatcacaacattttcaacgccgcacacaaccgatggttcgttctgaccgccaaataagaaaatggcaggagatgggcgcttcccgcaccgctatatctcctgccatatccgctctatatttttttcccatccccatacaaattcctatactgccccggcgtcatattctccgaactcttaaacctccttgtaaagttggacagattggcatatccagcctcctgggcaatctgggctatctgcttatctgtgtgaatcagacaatccttggtgtaatccagacgttttttggatatcagttcggagaaactggtattcaggttctgggttatgaatttactcatatagctggatgaatagccaaagtgttccgccattcccaccaggcagagactgctgtccctgtaattatcttctatgtatacaagcacctgcttaactaaatcattgcgggtgtcctgcctggaggccgcaaggacaccattgattctcataagagcatctcccagcttttcaccgaattcttccacagtcctgaacgcggtcagctggtacagttccttctccgtcagccggatgtcatttttcttcacttccttcaggagatggcttacgatatcataacagcacatcagcgccatctgtcccggaagctcctccaggctcagcaccacttcctgcacagagccctccaccccctccggcgaaccgctttccagacaccggctgatacacaagagacattcggtctgatagcggctgatggtagcgctgtactcctcaccctttccctgctccaggttctcaaaatccagctctttgtggggatttaacaaacggaacttcatgttggtaagggcctccagataggacagatgcacacctgacgcatcctcatgaatatttcctgcggaaatgacgcactcgcaactgccgaatatctccttcaaacgctccctggccccaatcctgtgttcctcagtcaggaccttgcggctgagaatgacggcaattgcgccgaaatagtacaggaaacttgtatacacgccgtaatccgtctgaaatctctcttttatgggaccttccttttctttgtacaaagcggataactccctggaagacatgtttcctccggccgccagaatcaccatatgattccgccccttcatctgctccgttagaatgccgttcaccatgtcgtcctcccgggtaccgtcctcccgggtgtcgtcctccccatagagcagctttgtcacaagccgttcctccaccaggggccactgcttttcaatctcctttgcaagggaatccctgacagaattcaggctgtcatactgatgctttataaataccagctcgtccctgctcctttcctcactgttttcattgtcctgtttcatatattgagccagctggtgtataggcttgtaataatggtaggccatgtagattgccataaagcatcccaggattaaaaagagtaaaactccggtgaccagcaggctgttattctgtaccacatctgccagcaggtcgggcatggttatcttactcaatatgataagagagggatggtccataggatatacgatataacggccctgtcccgctctctcctgaaaggtggtacagcttcccggctctgcctccaggacccgtcccatcacctcatccagccccagatcctccccttctgttgccagtatctttccctctccgttcagcacagcgattccatggctgtagctgcccggggacgtggtcatactctggctgattttggagggctgcagttccagcaccacccaggattcaaccttaaaggaataattatataccggataaatgaataccatctgcggtcttgttatgattccgtccttcatgtggtactccttgttgataacatcgtacccgggatggtccatattatacagtttttccaggaatggctgcctttcttcctccggcagcctcagctggcccgccagaagaatatccttggcataccgcccttgggaagaaaaactcatatctccattttcgtagaggatatacgcctttgttatgtaaggattggctgcattctcctcgcgcagcatgtccaccatctgaatctggttttgggcatcccggcttctggataccacagggccgctgaagctgattcggttcccggcctccataaggcggccgttcatggttaccaaatcatctcccagacgctccagaatattttcattgtacccaagaatctccctggacagattacggtacataataatttgtaaacaaatagaaagtaccaccataggcaccagaaaaaaagatgtaaaacccaacaaatatttatgaaaaatgcctctgcgcaaatctgtacctccccgccgtatatggttgtgcacatgccatttttacattatatattattttgtggtgattggaaagaagttaaatgggaagagcatatgttccattaaatggaagcgcatatctgccggacaggaaggaacacgcctgccgcattatatttatcagcaaaacagcaggaaaacgcgttcagatgcttacccgcgttttcctgccgttatccatacctatatgattccataatcccgccgccccgaaccccatcctgtacctgttccggaaacagccttacaccgaaacgcaaaacctgtcttatatccgcgccataacttcatttaaatccaatgttccggtaccgtcctccagttcaaaatacggtatgccgattcctcctgcccggcgcacagattcatacatctcattctgttcccggactgccagatactgcttcaaatccggaaggctggcagacaggttcttaaaatcaatgtccgcctgcttctctgtcagtttacataatgcatacagtgtgtcaggacataaatgacttcctataacagttactttcatactataaatctccttttctatcatatgattctatttggtttctgctatagcggcttgtgccgcggcagtatttcccatggaattttctttgtaaatctgtttttccagccagtcttttccttccaccagcctggtcaccatcatggaagcaatggtatcgccgctggcattaaggcaggttgcggccgggtccaccagaaatcctatggtggcaatcagcgggaaggcttctgccggaaagccgaagaggctgacaataagcatttctcccaccaggccgcccccgggagcaccggacagcacaaaggcgctcaggatagcaaccgccatggccatggcataggtaccgattccggtaaaggactggccgaatataccaaacagaaaacttatcttcactatggaggagagcacggaaccatccatatgcatggtcgcccccatgggcagcacaatatcccggatgtcccttggcacccctatcttgtcacacgcctcgcagtttacaggcagggcggcaatggagctctgagtggcaaatgcagtgaccgcaggattcagtatatgtttgaacatacgcctcactccctctcttcctcctgcgaaataagaatatgccggaaatgctgccatgaaataaacaatgcacatgggataatataccagcatggcatgtccgtagtctccgatcagtcccgggccgaactctcccaccagggatgcaaaatacgctcccagtccaatcggcgcgtacagcatgataatactcacgattttcatgataattgaattcaggttattgagcatccttcccacaggactgtcctcacctccgcaggcgctgacgcagaaaccggacaaaatggcgaatacaatgataggcagcatgttcttcctgctcataagccctgaaaaatcgtcaaccgtcagtgcgcctaccaccatttccccgattccgctcatttcctccatctcagcgccggcaaaatggatgctggtgcctgccgccggcggaaatacatttactaccaccagcaccaggacacctgcgatggcaccggtaatcacaaataccatcaccagactgctcagtatcttccccagccgtttcatgttcaccatgttccccactgcgctggatatggaaacaaaaaccattggaaccacaatcgtaaacatcaggttcagaaaaatatctcccaggggagccagaacctttgccttttcgccaaatatcaccccgatgacggcgccaatcatgatgcctgataataaaataattggaaaacggtaatttttccatatttctgatttgttcatcccttacttcctccttctcctttggcgcagcccggtctacagacgatccactgcgttctttaactgtcccagggctctctccagtacactccttgggcaggcggcattcagcctcatgtaaccggacaggctccgtccgaaggtatacccctcattcagtcccaaaccggccttctcgatcataaaggtacgcagggtctcattatccatattcagttcacggcagtccagccacacaagataagtggcatccggtaccgtaggcctgattttgggtatattggcgctgcagtattcccttatgaaggtaaagttcccatccagatacgcaagcagctgttccagccactcttccccctcgttaaacgctgcctccattgccacggaactgaacgcgttatttctgtggatatccatagccatccagaagtcatcaaatttcttcttcatctccagattgggaaaaattgtggtagatgcctgaagccccgccaggttgaaggtctttgtaccggaaatacagctgattacccttccggccgtctccgcggacaatgtggcggttggaatatgtttttttccatggaataccaggtcagaatgtatctcgtcggaaaccagcagagtgttgttggccatacagatatctgccattctggtcagcttctccctgctccatacaattcccagtggattgtgggggctgcacaaaaggaatatcctggcttccttagcctttgcttcaaaatcctcgaagtcaattccccatgcaccgtccttttccaccagtcggttttccagcacattccgaccccacgcctctgttacatcatagaattccgagtacacaggcgtctgaatcatgatgctgtcacccggttctgaaaacagctttacaatggatgacagggccggcaccactcccaggctccagctcatcatctccttttttatatcccatccgttgcgccgcttctgccagccccggatcgcctcaaagtaggaatccggcctggaggtatatccccagatcccctcttcggccctctccttaagggcgtctatgatgggctcagctgtcctgaaatccatatcggccacccataagggaatcacatcctccctgccgaatttcttcatcctctcatcatacttggctgccctgttgtggctcctgtcaatgacttcgtcaaaattatacttcatgtcatataccgcctttctttcattgtttatgctggctgtgcttttccgcagctgcttgtgctttccgcatctggctgtgcttttccgcatctgcctgtgcttttccgcatctggctgtacttttccgcatctgcctatttaataagcaagcatcatgccaacttttacaatcatattgaaatccacgcaaaaaaaggacttgattccttattaaatcaaatccttttccgctgtatttaaattattccccaaaccaaatcaaatggttatatcggccaccaattggttgtattcttttatttttggttgataatatggtttatttggttaaattcatatccttcccatatcttcctgcccagggatgttatacggcttccgcctcttccccgtccgaccctggccaggccatattccctgaatattcccaggatagacctgacggccggctgggagagaaggagcttttcttttctggcagcttccagaatccgctcccgtcccactgtctctccattttcagaggaacagtataacatttttagtacaaaccagtattcctccggttccagcccctgttcccgcattgcctgtttccacggtgcggtatcaggctgcaaaaccggttccggatattccgcctttttggacgcgcagtacgataatcctgccccaatcccatcatactgaaatgtggggggcaaatcctttacagtgatgacctggctgcctgtaaagcaaaagtactccgccaggttgcgcagttcccggatattccccggccagctgtacgtgcggaaaatcttctttacctcctctgagagcacaaactctcccttcagctcccggcagaaccgttccatgagaaggaatacatcctcccccctccggcacaggggaggaatgaggaccggcagtgtgttcagacggtaatacaggtcccgccggaagctgccgtcacgcaccttttcttccagggattcattggtggctgccacgatacgtacatccacgctgataatcttattgccgcccacccgcatgatctcatgctcctgaagcacccgcagcaattttacctggagggccggactcatgccctccacctcatccagaaacaaggtgccgtgatgggcgaattcaaacagccctggtcttccgccttttttggccccggtaaacgcgccctcctcatacccgaaaagctcgctttccagcagattttccggcatagccccgcagtttatggccacaaacggccccttttccctcctggaagccagatgcactgcgttggcaaacaactccttgccagtgcctgtctcaccaattaagagtaccggtgattccgtgtaggccatgcgccttaaaatagcctttgtcctcaatatctccccggacaccccaatcacatcctcaaaggtgtacttggcccggtaccccttgtgcatcagctggttgcgcagctcatgctggcggttctcagcatcattaaagggctgcaggatggcaaacgcgccgatgcagtcctccctgcgcagcaccggaaccactgtgacgcctacattcacattgttgatgcggattaccctgggctctatcttctcttttgtcttaaggcactcaataaacggcaaataggccagggaggcagatgcctgcttatgcatcaccagcgtacggctcagccccgtaatcgtttccgccttcctgttcatggcaaatatctcggcccgctcattgataccgatgattccctcgtccaatatctccatcagtatgtcaaactggctttccagccttctggacctggcgaacatcatgtcaaaattgtaggtgctggtgaccacacttgaaaaatatgcctggaacttaggcgtctccaacagttcctccaggcccagttttaacgctgcctcaatcatggtctccgaagtcagacagcgctgtcctatgttgaccacctgcttcacgctgtccgggacataccgttcttcgtccggagtgacagccaggccaatgccctccaccggctccgctcccggataaaagggtataaattcaatgtggttcacccccagctggttcaaacccgatgtggcttcccggaccattttctccgtcatattcacaaacagtgccctggttccggcaggaatggtccgcagcagccgtatggtttcccatagataggtcacgtgaatctcgctgatctgcgcttcaatggggatgtactggggcacatcctcccggttgtcaaatgcgtctgttgacatgagatacagatccgcccgctccatattggaaatcgttccttctctcacactgtatgaattcaccttcacgtattccccgaacagctcctgcacctgttttccgtaaaatgcgctggctcttgggtccagggcaatgaccgctacctttttaaccattttatccctccatttcaaccattaaaaccattataagaccaaaaccggcctttccgcaagctgaattttcaggcatgaatcttgcttataatgagagagagataggatttgcgctgaacgccctgtcattcgtcagggctgcatggtgcgggaattgcaaaggaggaacatcatgaataaagaagaattgattgcattgttaaagcaggaggtagtgcctgccctgggctgtactgagccagtgtgtgtggccctggccgcggcagatgccgcaaaggctgccggaggaaccattctgtccgtcagggtagaaatgaatccaggcatctataagaacggtatgaatgtaggtattcccggttttgaccgggtgggactcaaatatgccgctgccctgggcgcctgcctggccaatcctcagaaaggacttaaactcctggaggacctttcccctgctgtcagcagccaggccataaacctggtggaatccggaatggtcacacttaagctcaaggaggacgagcccctgctctatacccatgcagaagcagtgtcctctgccggtacaggagccagcacaataagaaatacccattccaatattgtctgtactgcccggacagtaaacggagttctcacgcctttctttcagaaggaatactcccttaccggcaggacggctctccatgaaaagctggcctccatgaccatttcgcagattgtatcgctggtcgaaagctgttccccggaggaactggccttcatggaagacggagcccggatgaactctgccctggccgattacggcatgcagcacaaacttggcatcggagccgcctcctctctggcaaaatactgccggaccgatattgtgggaaactcccttatgagccgtattatgacccttatggccagcagcgcggaaggccgcatgtgcggctgtccctatgcagtcatgagcagcgcaggcagcggcaaccacggccttaccaccattctgcctgtagtggaaacagcccggtatcttggctctgacaaagaacatctggtaaaggcgctggccatatcccattccatcaatgtgtacatcaaggaattcaccggcaagctgtccgccacctgcggatgcggtgtctccgctgcttctgccgcctctgcttccatggtctggctcatgggcggcagccatgaacagatgggatatgccatcatcaatatgagcggcaacctgaccggcatgatttgtgacggcggaaaaatcggatgtgccttaaaactggctacagccagcggggcagcccttatgagcgcctgtctggccgtggacaaaaccgtgctggatccaaaggacggcatatgccacgccacaccggagggcgccatccgcaatatgggacgaatcagcaatcccggcatggcgcagacagaccgcaccattctggaaatcatgatggagaaagattaatccgccctttagtccaccagcttatccagttccttcacatgttctgtctcattggaggttttatgctttgccttggatgcgtacaggttcacggatgcctgggacttcttaataggctgcatggttcctgctccggccacacatccgcccggacacgccattccctccagaaggtagccattgtatttcccggcctttgccatggtcagcagttttctgcattccttaaggccctctgcattggctaccttgatttccttatccggataacgctcatgaatcacatccactacggacttggccaccccgcctgccaccgcaaagttacggccgtccatggaagcatcattgacgccttccggatcttcttctatcttctccacgtccacatgccgggcgtcaaagatgccgtccatttcttcaaaggtaaggacgaaatccacatcgcttcgtatgtccgtacgcatggcctccagcttcttggctgcgcagggaccgatgaatacaacctttgcattggaatggtgcctctttatcagccttgccgtcaatgtcatgggagtcaatgccatagaaatacagtccgcatgctccgggaacagcttcttagccatcatggaccaggccgggcagcaggatgtagccataaagggaagcttttccggcacttcctggataaagtcaattgcctcctgggtagcgcacaggtcggctcccaccgccacctcaaatacgtccgcaaaccccagcgccttcattgctgcacgcagcttgccgggcgtcacctttggtccgaactgccccacaaaagccggggcaactgccgcataaaccctttcccctgactggatggcccgtataacctggaatatctgcgatttatccgctatggctccaaaggggcagttcaccagacacattccgcaggatacgcatttatcgtaatcaatatccgcctttccattctcatccgtggaaatggcgtccataccgcaggcagcggcgcagggtctttcctggataatgatggccttataggaacaaacatccgcgcaccttccgcatttgatgcatttgtcgtcattgatgtgggagcgtccattggtcctgtccagcttgatggcatccttagggcacacctcctcacatggatgggccagacagccctggcagccgtctgttacaaatacacgcttttcatgacaggcattgcaggcaaatttaatcacattaatcaggggaggcgtataataagtctccggtctgtccgcagcctctatgttatccgaaaccggcgcatgttccgccgcgctgcggtacggaagccccatggccaatctgagccgttccccgacaatagcccgttccaaaaaaacgtcattgcggaaattccccacttctcccggtatgattttatacggaagctcttcaatacgtttatccaccggccattccgtatgataggccatccttgccacttccctgaatatcctgtgtctgatttcctgtatacgtgtctccactcctcgcatattcctgcctccttgttatgagcacttagagaccgtcctttggtctcttacgtgcgatacattccgctggcacttggcgggcgtcctttgaccgcttagtgcagcggttcgttatgagcacttagtgacccgtcctttggtctcttacgtgcgatacattccgctggcacttggcgggcgtcctttgaccgcttagtgcagcggttcgttatgagcacttagtgacccgtcctttggtctcttacgtgcgatacattccgcttttaacagtaccgattatataccagcccatgaaaaatgcaaatgcctaaatgcatttttccccttttgttcttaaaataaagcacggaccgcagacaaaaacaggcgtccggccgttttttcccggccgcgcgcctgttcatacgttaccattttaccagtctcagcacctcttccgccaatacagactatacaagccttgaccgcagcataccttatccgcctttttccatgtaatatcacaggtcatacacaaaatgcggaaccggacggccgtccacaggggaccgtgtttccccgtcccggaccgcgcccatttttctgtaaaatcccactgcctgggggctggtaacaaaatgaatgcggcatatttcctgttttccgcaccagccggtcatatgctcccacatctgttttcccagtcccctccccagcctttcctctgccacataaaaatactctaattcccatgcatctctatcctgcctgattccccagaaggcagccggacagccgcgttcacctgccgcatacacaggattacggcggataaaatcttccgtaacattaaaccctgcgtcaaagttttccataaacgcctcatcatatccccagtgtgcctccgaagccctggcaagccggcgcagcgcctccgtatctttgggctctgccctggcaaacctcagagcctgccttttatatcggccgggataaagattctttgcctccctggtaaatctttccaccacagcttttttctgctccgtatacccatcccggtcatgttcatattctttccagagtcccagcttcagctcctcatattccctggctgcttccggatgctccctcagataatccctaaaatacagctcgtcgttatcccccgcctctctcagatgcagatggaataccttctccgcaaatcccaacagcgtgtaacccctgttgaacgaaatcctccctgccttttccatcatgcagatgtagccgcccccgataatatgttccttcaaggcctgcatatccccgccttcccccatttccaccaggatatccactatgggcttggcccagatggatgggatggatgtgcttcccacatgactgatttcgcagatatcctccatgggaaggataccaaacagccgctccctttcctcctggtaccactgcgtccagaccggcctgtgctctgtgaggaaaacagggaacagctgccacagttcctccaggctcatgccggaaaacggatcctgtctatccttcatcatcatatctctccaattgtttctcccattcctcctttacccctttcatcctgcggaaataagagctcatctcatccgccatgcctgacagacggtttaggagcgtggagaaatcctttaacatttcatcgtcctggaaataggggtatacgatatcatggtcaatctcgctccagccctcctcgaacagggttcttccctggatttccacataatatcccttatatttgatgatatagtggagggagcggtatataccgttggacttaatctcaatcaaattctcgtcataaatcctggtgtccccgtttctgcggtagacctttggccgttccgcgatgtaataatgcccggtgtcctcatcaaaatcctttatgcggtccaccacatatagatcagggttattctcaaatacactggttatatatttgtggaaatgaatccaatcctcccggtaaaggaaaaacacacgaattccaatcaggtccgtgatgtacttatggtaattgcttctgtttatatcctcaaaccgttcaaaatgctcgttgcgcttgcgtatgattttctctatcagatggccgggatccttagtgcggtaccggtaggaatggatgcctgccctctcaatatcatagagataatcgtacacaaaatccttaccaatgctgcgcagttttccctcaacggacaaatagtcatcatagatggccgccagctcctcccagtccagtccggccgccttaagttcctcaggttcaatgttgtagcttgttaaaaatttttccttgtcaatcatctggtatcattcctcctgtgtctaaaatgtctgcatatccttactgacgccgtactttatccgtcaatggggcttcatcaccaacgctctttcatccactgcccgcagggttgccagtattccgtccaggtgatcgtactcatgctgaatcagttccgacatatcccctttcagttccatggagcaatcgttccattccaggtctttataatatatgatgcaccgtttataccgctttaccctgaccagcaggtcgggaaatgacatacaatcatccagcacgtctatcatctcctgttcaggaaaggcaagccggggattgataaacagcaccggcgtgtccagatgacggtaaataacacgtttcttcaccccaatctggggcgccgcaatggcccttcccactccatagcgggccctaaatgccaacagagtatcctttaaatcctccctcacctgttccatctgatgaagctcttctattttcacttcctgactgacctcatataattcaggatttcccaataacagaatggtccgttccacctcaaagcctccctctgcgctgttttcgttcccgtacaacgcgttttcctaagtatatcatgattccatccgatttccaaatcccaattaaagggtaaggcaaaaaaaatccggaccgtctcctcagtcgagacagtccgggtctgtatgcctttttagatattacgcctgggggaactcaatcagattcagtccgatggattcactcatccttctgcctgcggttccgtcaatcaccgtaatgaaaatctcagcggtggcgctgataaccgccctgttcaaatggcctccgtggcactctcccaccagcggattgccgattaccatgtgcagatgaagataggggttttctccctgctgtgtaatgttgcctgtaagggaggcaatttcatagattcccttgaaggactttccataatacttcttctccgttgtatcaaataccccgagttccacctcacaggcagctcccagcccggaaacctctcccagagccaccttttctgttctgcacacttcccggatacactctgtcacttcctcgcccggattcaggcggagaatgattttttgtccaaatcgcttatattccatggtattgactcctttcaaacacagcttataatacatttaaccattatatattcatgtatgtaagatgtaaaattatattttctatggtctgctctaattttttgttatgattggctatgtctgagtttcaaaaatattccttgggattctcccgcattaaaattaacatccccgtcctcccttcccattgtcaaatcccctttacaggtatataattatactaacagtttttttatactatacacctataaagatactcaggaggtgatacagaatggataacgcaataaaaatacctgattgtcccgtggaaatgaccctgcagcttatcggcgataaatggaaggttctcatcatccgggatttgctcacagggacaaaacggttcaacgagctcatgcggtcagtgaacggcataacccagaaagtcctgaccagccacctcagggccatggaacaggcaggcctgattacccgcaaaatatatccccaggtccccccgaaggtggaatataccctgaccgaaacaggatacagcctgaaacccatactggactccatggtagcctggggaacggattacaaaaagaacataggacaaatgtaaacgcacaaagagccgtgcccccggtttctctcaaatccggggaccatggctcttatatgatccttatgtgaaattactatgatattatccctgtgcagccggctccagtcctaaaaaaaccgctgtgtcctgaagcgccttcataccgtcaagacgccctaaatcatacatttgctgtatcttctccggtctgttttctgtccggctgattttaataagacggctgggacgtatgacaaagatttccccggcagactccatgcgtctgacctcctccagttcccggttatacatcagatggcggcactccatggtttttataaattcggggtatctgcggtataccctgcggatagcggggagcatttggtttggctttttgcggtaaccatccggccgggtaagtatgaccaggcttcttttaaagcccattttgcggaatgcagctacgggaatggagtcggatacgcctccgtccagaagcttctgtccgtctatctccacaatcctggaaaccagaggcatggaggcggatgccctgatccattgtatgttctcccccctcaggctgccgcatctgtggtataccggcctgccggtttccacatctgtgcaggtggcataaaactccatgggcgaagcctcaaaggcgtcattgtcaaatgggtccagccgctccggcagttcgtgataacagaactcatttcccaccagatcgccggtcattaccaacgaccggaaactcatataccgcgggtcgcggcagtacttcagattatagcgtatggagcgcccggcctgtcccgccacaaagctgcacccatggatggctcctgccgaaactcctaccagaccgtctgccttaatcccatgttccaataatacgtccaatacgccggcggcgtaaatgccccgcattccgccgccttccacaacaattccagttttcatttccatctacctctttacaggcgtattttaggaattagttcttacctcatcccactggccatggcctgtcagccagttcagagccttgtgccactcccttaccaccccggtcttcatgcccacaggctccggcagttcatggcgtctggcgttgatgcaggaccattccagacaggaaataaggtcgcaggcatccaacagctctctggggctcttaggcctggactttgccatgattttactgatactggtgccatttctcagtagctttaccaaatcagcgggattgcagggatgatccgggaatcccagctcctccaccagtcccagcgcccattctaccacatgaagggattcatactgccttaagaaagacaggatttccttcctgtcgggagccgtatcgtgcagatacttccactcctttggagagaaataatcctgggtattgttattatcaatataatccatcaggaaattctgtgccttttccatgccctgtttttcatccagaaggcattccgaataaatggcaacgcccataatggccagtgccctctgagcagtctcctccagggaggggcaggttatctgtgaagcaggcgcaactgcgggcagccatcctggtacatagattgcatttccgataagcgtctgcatggtgcgcatcctgcggtccacctgctcctgggtgatatcctttccggcctttaagtccggctcctgatagggaagatagcgggtaaaggcgcttccgcccttgtcggacagaatcagtagcttttccccattttccccgctgcagaacatgccgtcctctttctcatcctggttctgaatcaggataattccctccagatcgtttaaaatggacacgaacatatcctcaatcatggtcttcttgtcctcaatatcctcttcgtcctccacgtcaaaggcatattccaccagcacaaaacttctggcccgtccaatctggtacagcaggttggtcttaacatccacaacccctgttttaacctgataaaaatggtcgcaggttccctccacctgtctctttataaactcctccgccttttcaccggcagactcgctggccactgccagacggatttctatatctccgttatgcagtacaagggtatctccctttccctccgggtccaagccaaaggttgtacacaaaacctgaatgattttttcctgtgacgggatatctgagaaaatgaaggacttgccttcatatcgctttgctggggctgatgtctctgctgcattcttttcttcaaacaattccatataaatctccttcttaaattacgccgtataaaacagtttgattatactatgtttggtgggaaaacacaaattattccttatattttctactatttcccttcaaaataatccgaagccaccatcccatagatacactcatcgcatatcccctgattattccacccataccggcggagggtgccctccttcttaagcccgcaggccgccataacctttccgctgttcacattgcgtatatcgtgcagggcctccacgcggttggcaccctccacctcgaaaaagaaccgaatcagttccgcaaatgcctccttcatgattttgtggccccaccaattcctgcccaggcagtatcccaccgtcacacggcccgccttctggttaagctgcggaacagaaatgcttccgatgacatttccctcgtcttccttccgcgctatcgcccaggtgtaaaaatccttagactcgtatgacttaatccatccctccagaatttgctttgtctcctccacatccttgtgaggttcccaggagaggtacttcgtgacctggggatcgtttgcccagtttctaaacatggcatcagcgtcctctatcacataagggcgcagcaccagccgctttgtctccattcttacggttccggaattcttcataaggttcctctcctttcctgcacatacaaaggatgtgcgcagcatgattgactggcagcaaaatattattctctaatatagcacacatcccgcattttaggaacccttgatattctaaattattttatatagccatgctctctgccgcttgctccatccactacttgctccatccaccgctcgctccatccaccgcttactccatcccgaaatacacctttaacgccctccccataaactccgatgcaccttccccgtatttcctgtctgttatttcctgaaatgcgggattcgtcatacaattattgaccatgaaggaccagtagctgctgcccatatccattcctccattgctttcattgataagtaataccagttcaccggctatcttctgtacttcgtccgaaccggcttccttactcaaatccgcggtaagcttctttgtcagcgtatccgttttatccacggcctcatctgcctctttctgtgtgaacccaggtccattttccagaaaatgctgcagattttcctccatggcctttgtgaatttctcaatgctgccatattgttttactgccatctgtgctatgtggccttcgttggcctttaactcagaaatcatttcgtcaaagctctccatactgccaagctgctttatgatttcttccatatgtgtccttttataatctgttagaacctgaaaataattgctcatatcaaattccttgaaatccaaagttctctctccttttataagtctgtccaacagctccagcagcgcgtttaaccggtccctcttaatccgaatcagttcccgctgtttttcaaatgcatccttcctgtcatacaaaggacttgccataacagcctttatttcctttaatgtgaaatccagctccttaaaaaacagtatctgctgcagcactgccactgcattttcatcatacatcctgtatcctgcttcggtcacctgagcgggcttaagcagaccaatttcatcataaaactgcaatgtcctaacgctgacaccagtcagggaagacatctgtttcactgtcatcataccaatcatccttctttcaatttcagagcttccgcctatgattatctgccggcagcggaatatccgcatcagctttatctcttaccactactgtacactatcacgttacgtaagagtcaatactttttaaataaaaaattcttacatgcaaaaaggagcttcccaaaagcattttccccaacatagctcatgtccggtcctgattctgcctcccgaaaacccctttccagcagtaactggcatttcgttgtatgcatccctctgctgccgctgattttccacagccgcctttatgcaagttcctccatcagttcttcctgcagctcctggttcaccaatttcatgtcaccctcaaacaccttgggatatggaaatgccatgtccccgtataacttgccgaatgccacgtagaccttcttccccttcagcgcaaatatagtccctatgccatagcgcttatgctccaccttttgattcataattctcatgttatccgactcctttctttaaaacctttctcttaacctctcttccggccgtactttcagcctttcttccgtccttacttccgttcttactttcttccttactttcgtccttatttctaatcctcttctaaataacctttgccatcttttcccttgccagccgttcccttgacgctttccttcttttctttaacaattccgtctgctcctgtttcctttttgcctcatataactgataaaccacaagacgctgttttgcttcttccgtccgcttcttctttaattccatgaccgcggcttctgcccgcttctgaaggattggatcgtcaaaacaaagaaatcgctcaaaggcatcgggatacggaaatacctttctcccggcttcaccatcaaacagaaccaccatatggttctgtaccacctccgccactcttccagtcccatatctgacatgtttcacggattcatttttcatcttctcaccttcctgcaaaagcgttgactgttccctgctcatcatccattgagctcattgagctgcttcatccgtattcttccggattatctcagtcattattttaccattttcccaaaacaaatttcaaaggagaactttctcctcaaaaaaactttgtgagttctgtgcagagggaacctctctgtttttgtatacttttcccgcgttccatcagcctgtttctgcaagcggaattaacctgttacgcaaaaaatgccctccggctacatgatatgccggaaagcattttccataaatcttattttcaagtccaatctttattccatccctgcaaaaaatcactccactcccgcttttttgcaaatatcattgagacagcatgcctcacagcggggttttgtcctggctgtacagacgtcccggccatggaataccaatctgtggcagaaatcgctgccctcctcaggcggcacaagcttccacagtgccatttccaccttctttggctccttgattccgtccaccaggcccatacggttcaccaggcggatacagtgtgtgtccgtcacaatggcaggctttccgaacacatcccccataatcaggtttgcgctctttcttcccactccgggaagctttaacagggcgtcaaagtcatcgggcaccttgcctccatactgttccttcaatatcttcatgcaggcgcttatgtccctggccttgctgtgtcccaggccgcagggcttcactatccgctcaatatcttccacatccgcctctgccagggcatccacatccggatatttggcgtaaaggtcctcaaccaccacgttcactcttgcgtctgtacactgtgccgccaggcgcacactgaccagcagcttccaggcatggtcatagtccagggtacagcctgcatcgggatattcttttttcaggcggtctatgatttccaatgcaagtttttcctttgtcatgtcgtatctcctttgtatgctgcagcgcacttctttttaacttcctttttacttctttgtatcatcctgcgcttttcttttcacatacatcttattatacatgacacaggttcatttctcaaggaaaataccctggagcagacttaaagacaacggctccggggtattttattccatccaatatgaaacttgttcacacatgattatttaacaataaacgactttctcttactcaccacatcaaagataaccgctgccaacagaacgccgccctttaccaccttctgcaggttctggtccacgcccatgatgctcatgcccagattcagcacgcccataagggttgcgcccacaataaccccggggaccgtaccggtgccgccgtatgcggaagcgccgccgatgaagcacgcgccgatggcgtccatctcatagctgtttccggccgtggggttggcggagttcagtctggctaccgtgaccatgcccgcgatggctgccagaaggcccatgtttaagtaggccaggaaatatacccggttggtattgataccggaaagcttggttgccttctcattgccgcccacagcatagaagtaacggcctgtggtggtcttggaggcaatatagctgtagattccgatgataaccgctacccagataagagcgtttggaattcccttgtactgggccaggcggaacatgaaggagagcaggacaacgcagatgactgccattttgatcacaactcccgtaagaggctccacatagtatccctttgccagcttctgccgccttccattgaaaactataaaggcatagacaacacaggcaataactcccaccaggaagcaggtcaggttaaagccctccacagcaaagaaatccggcacataggtattgaacagcaccagaaactggtccggtatgggagccagcgtcattccctgaagcaccacgttggaaagtcccctgaacatcagcatgccggccagggtaacgataaacggaggaatcctgacataggcaatccagaatccctgccatgctcccaccaacattcccatgatggccatggcgataagtgtaaggtaagggctgatgcccatttccaccatcatcttgcctccgatggcgcccacgaagcataccacggaaccaaccgacaggtcgatgttgcctccggtcaggatacagaacagcatgccggtggccaggataaatacataggcattctgggcaatcaggttgtttacgttctgaggaagaagcatcttgcctcccgtattcacggtaaacagtatgacgataaccgcaagagcgataatcattgtatattttttcagaacctctgagattttcagcttttgatccatggtctactctcctttatcagctttaagaatacaggacataatatattcctgggtagcttccgaagcgtccacttccccggccagcctgccctcattcataatataaatgcggtctgacatgcccagcacctcgggcagctccgacgatatcatgatgacggacttcccttcctccaccagacggtttatgatacagtatatctcatactttgcgcctacgtcgattccccttgtgggctcatccagaatcagaacatccggctccgtaaacatccattttgccagaagcaccttctgctggttgccgccgcttagatttcctgcgttctgttccactccaggacattttgtcttcagcttatccttgtactccacagccaccatgtattctttgtccttgtctatgactccatggctgctgaccgctcccatgttagcaagggtggtgtttacacgtatgggattggacaggataaggccgtttcccttcctgtcctcggtcacatatgcgatcttatggctgatggcgtcgtgcaccgtattcagatggacttcttttccctcaataaaaagctgtcccgaaatattggtaccgtagctctttccgaaaatgctcatggccagctccgtacgtcccgctcccataagcccgcagattcccaccacttcccctttgttcacatgaatggacacatggtccaccaccttcctgtctgagtacaggggatggtataccacccagtccctgacctccagggcagtattgccgatgttgatattctccctcctggggaaccggtctgtcagctcacgtcccaccattccctttatgatccggtcctctgagatgtcgtctgtctgtttatccagggtctctatggtggagccgtcacggatgaccgttatcttgtcagctacatatgcgatctcattgagcttatgggaaataatgatggatgtcatgccctcctgcttgaatttaagcagcagctccagcagggccttggaatcatcctcattgagggaagccgttggttcgtccagaatcagcagccgggcctttttggcaagggccttggctatctccaccagctgctgctttcccactccgatatccttgatcaatgtatgggaggactcgttaaggcccactgtctttaaatagcggtcagcctcgtcgtatgtctggtcccagttaattgccattttctttcctttttcatttccaaggtacatgttctcgccaatggacatatacggaatcaatgccagctcctggtggatgatgacgattcccttttcctcactgtcgctgattttatcaaacttgcacacctgaccgtcgtaaatgatgtcgccctcatatgtgccgtagggatatatgccgctgagcacgttcatgagagtggatttaccggctccgttttcccccaccagcgcatggatttctcccttttccaccttcagatttacattgtcaagggcttttactccggggaaggtcttggtgatatttctcatttccaaaagtatctctgccattctatccctcctacaaccatacaggcgggtgtttctccccgcctgtacgattctcatcttttccggcctgattggccggtccatctgattactttaactggtcttccgtgtaatagccggaatcaatcagcatttctttgtaattatcaattgtgacaacaaccggctcgcagagatatgtggggattacgcctgtgccgttatcataagacttggtatcattaacttctgcctctccgccctgcataacggcgtctaccatcttaactacctgtgaggccagggtacgtgtatccttgaatacggacatagcctgcttgcctgcaatcaggttctttacattggcaatatcacagtcctgaccggtgataatgggatattcgccggtataggaggatgcaagggcattctcaacacccagtgcagtagagtcgttggagcaaagcactgcgtttaaaacggttccgtcggagtaatttcctgcaatgatggtatccattctgttctgtgccttctctgaatcccagttagcggttgccacctgctcgaatgtggtctggccggactttacaaccagctttccgctgtcaatgtaaggctgaagcacatccatggctccgccgaagaagaagttgcagttattgtcagccgggtcgccggtgaacatctcgatgttgaacggtccgtcgttctcctctaatccaagggcctctaccagatattcgccctgcttctgtcctaccatgtagttgtcaaaggttgcgtaatatgtaacagcgtcagagttcatcagaagcctgtcataggaaataacaggtatgcctgcttccttggcctgtcccagaggctcgcccagagagcttccgtcgatggatgcgatgaccagcagctcacagccgttggaaatcatgttctccacctgggatacctgggtctgtacatcgttgctggcgtactgaaggtctacctcatatccggccgcctccagctctgccttcatattgcttccgtcctggttccatctctgcaggtccttggtgggcattgccacgccaaccaggtgcttttcgccggatgcagcctcatcctttgctgcttctgtctcagccttggtgtcctctgctttggcgtcctctgcctttgcttcggtctgggcctctgtctttgcctctgaagcaggagcagctccctccttacttccgcatgccataaggctgcctgccatggctaatgtaagcatggtcactaacaatttctttttcatattgtaaatcctcctccataatgttttgatagtttaaatataccacagcccgctctggacttgcttggcacccatctgcacacttttaagaggtttaaaaaaatgccctgcaggatacaggacatttttgctcagtttattttatttttagttaaaaatgtgctatcatccggctgtacaccctaattcacattcaaatacacatcctcctttgcatgaaacccgcccttaatgataacctcgtccatgttttcctttgtgacggcaatgggctgaagctccaggtaaggtacgttataggtgccgtcataggcagtgtcctgcacctcctcgatttcctcccccagtcccaggagaaccgcgcatttggctgccaggctggcctcctgttccacggatttaaaagccgtcatttcctgggtttcctccacgatgcgctgacaggctgccaggtcgccgtcctgaccggtcacgcacacctttccggccagccgttcttcggacaaggccctaaaggcctggctggccagatcatcgtttccgcagatgattccctttacattgcggtccagctttaatccttccttcgtataggtataggcattttccgcaatccagccagggcagttggcttcatagaccacattgagattgctgccggccagggtctcgtcaatcccctctcggatcagcgaaacattgttgtcggtcaggggcccctgaatcaggaagatatcgcctccgtccggaatattttccagcatgctctcagccatcagcctgcccacctcggtgttgtcaaacgatatgtataaatcgcacccggcattcattatgagccggtcataggaaacagtcttgattcccgcttccctggctttaatcatcacatctgacagcgcctcacagtctcctgccaccaccacgatgacatccacctgcttcttaatgaaatactcaatctgggaaatctgttcctccacatccccgttggcattctgtacattgacctccgcccccagctcctttgcagcggacacaaacacatccctctcccgcatccaccgctctatgacaaaggattcaaagctgagaccaatctgtacctcctgctcctcctgctccacgctgcctgccgccgcgtcttctgtcttggcgcagcctgagaccgccaggaccgagaacagggctgtgagcaatatgcagacaatactgcctgcggtcctctttttacgtatccccatatggtttccctatcctttccttaaccagtcctaaacctgtccttaaaccttccctgccccattctccatccgttccctgtactcgctgggattgacgccctcgtatttcttaaaaatacggctgaagtaattggggtcgctgtatcccaccatggcgcatatctgcttgatgctgtaatccggattccggaggcagacacaggcctgtctcattctggtccgtgtcaggtattcgatgaaattttcccctgttccctgcttgaacagcttgctgaaatagtaagggcttatattcaccatcctggatatctcgtccagggatatatccttctggtaattttcgtcaatgtattttctcaccgtatccaccaggtactccatctccttctttttctcagtacccgcgcattgacatatttcccgtgttttttccaggaaccagcggcacaatttgtcgctgtcagatgcctcttttatctcccggatataactgcccctgggctttaagccaaactcagtgccgtcctttgcgcatatccggtactccagctgcatgatgagctccagcaccttggcctccaagtcttcacggcagtcataccttccctgcatacacgaaaacagctcggccccgcaggcagcggccccctcgctgtccgccttcaatccccgctcgtaataactgttttccagctcctttgggtattccccggccacgtcctcctgcctgcttgggatatccgtgatgtggaccacatggctgacgctctcccgcaatgccctcagcgcctccccatatgactcctttgcatttcccagagtttttgtgctcccgataccgctgcggaaatcactgccaatgtgttcctccagcttctggagcatggtcctggttcttgtgatgacctccaccctctcttcatacttaagcaccggctcaggggatggcacaaacagcaccacccggtttcccatgacaggtccggcgatacaggaaaaataatccctcacgatttccctcatggcctggtaatacttgttggcctttacgctggatccgattacattggtcagcctgccgctctcatccctgtctccgaattccagaaccaggcagaaaccgtaatgctccctgattcccagcagttcctcgtagccggagctgtccgcgccgtcgtcctgcagcatattgtagataaatccgctctcaatcatgggaaccacgatttccagcctctcccttattttaaggtcgtcgcttctcttctgtctggcttcctccacccgctgcatggctttcatgcatacgtccaggattatctttttattggaaatgggcttggtcagatattccataacacccaggttcacagcctcctttgcataggcgaatttatcgtaggctgtgatgataataatcatcatctccttatccaccttgcgtatttcctggatggcctggattccgctgagccccggcatatggatgtccacaaatgcaatatccgggtgaaagctctccgccatctccacaacacctctgccggtcttgacacaccgtatatcgcattcgcttccaaagctggtggtaatgatcttcttaagggactccagcataattccctcatcatctgccagtaatatccgaaacatgtccaatctcctccttcaccggaatatggatgatgacctcggtccccattccgggaccttcgcttacaatctggaccagccccttttgctgataatacagctccagacggctgaccacattgtccaggccgattcccgtggaatcgccgtcatccggtgtttcctgctttctgccttccataacctcaagaattctctctcggctcatacccttaccgttatcccgtacgctgatgcggatggagtccctgcatccatgaaccgtaagaagaatcgtcccattctcttccatgccgcggatcccgtgtctgaccgcattctccacaatgggctgcagtatcatgctgggcatcttcacatccaatacccgctggtctatggattctttaaactgtatgtcccctgcaaatctcacattcagtatgtagatataattttcagccgcagccgtctcatcccctaccgtggcatcctccaatcctttctttacattatagcggaaaaattccgccatcttatccaggaaaatgcaggttttttccgcgtcctccatcatggccagctgggcccccgcattgagggaattaaacagaaaatggggattgatctgggactgcaggtatttaaggcgggcttccttcaggtggttttccatcaggagctcccgctccaaaagctcctgctccttctcagccccctcctttaccttagccacatattcctccaggcttcctaccatctggttgaaggtcctggtgacaatgccaatctcgtcgttggaatccgtatccggcatctttacattaaagttcccctgtcccaccagattggcggtcctggccagactggtaaggggcgttaccatatcctttaccagcatcctgagcaccataagccctgccagcatgacaatcatcaggattaccatgttgaacacctccatgtagcgaagggcctccctcatggtctggtagctggcagagttgtttttaaactgcagctcattgagctccgatatacgcgtgttgatgtactgatagagggtaagggccctctcatatgcctccctgtaccgctctacgttccgcccccgcttggcctgcaccgcatcctgggtcatatccagataggattccgacatcatgcggatgttcttttccaggatttttcccggcttgtcaatggtcttatcgttcaggcgttctaacaatccctggtattcctgctggcttttgtaatagctctcaaggctgtccgagctctttacggacacatagtctcccatgtccttctgcacatgctccagggcctctgacagctcgcttaggtttacattgctggcatataccgtatccatcttgccggcaatcttgtttacctggagatagataaatatgttgcttataaataatgtcagtatcataagggtcacggccagcagtattttcttctccaggctcagatggctccatatgttctttcccggtctctccatactcatcgctcacttttcaaacaggctctaatccacattttcctttgtgacaaactgcaaatccacactgtaataggaatttgcgtgtccctcctgcagatattcctccaatgcctgcacacagtaccgccccatctgctccgtatcaatgacaagcgttaccggaatattccccttcctgacagcctctaaaatctgatctgacttgtaataccccaggagctgcagctcccccaccttattgtaatcaatcatggcctggtaggcagcctctgtatccacggcctctgtacacacaaggacatccgggattccctccttgcggaaaaatatgttccttatggtctcatccgcatccaccttcccggtggagcgcatggtctcctgtatgagcctgacccgtcccgatgtgtccggtgaagtcaccagcaggttattgatctgttctgctatctgcacctggctgctgttatccctgtcgtggagcagaagcatcacctccacatcatccttatccggcggcaccagctttaaaatctgttccccgtactgccggcccagctggtagtcattgacccccacaaaacttatacggctggtatccggcgcatccttgagaaccgtgaccacgggtattcccgccttaccggcctcattaatccgctcatctatcttatggccgcccgtgtattctaggataattccatccaccccggaagcaatggccatgtccatgagactctctatctctatggtagaggaaagactctttcccattagttccaccagggcattgtgctcccttgcagcctccctggtgctctcgtacacatccttccagaaaggcatgtcacaatcctccacaatcatgacataatggtagcggtattcgtttccatcctccccgccgtccttccccacctgatttaaaacattctggtaataggagctggtgaccagtgtgaggaacagcactaccagtattccagcaattacaattatacgttccaagcgtacccgggttttcattgtttttctctgcctgccctttatccataatgagcttattatactgctttcaggcaaaatgaacaatagccaagctgctgcagatgaatatctggtaagccataatatatgaatgttccagccacactgcatcatcatgatatataaattattccacataaaaagaaaggaaggcagaaacaggcatttctgccctatcctgcctttccttattcttaacaattccgccagcttactgtgccacatcagttccagtcaacttctgataatatttgatcaatgcaccgtggtcttcctgtccgcacccatctgccttcaaaacctggaacatctgcattatctgggcagttaacggcatgggagtatgtgtggcgtaccctgtctccatggcattggtaaggtccttgatatgcagatcaattttaaagcccggtttataattaccttccagcatcataggagcctttgcattcatgacggcagaaccggcaagcccgcctttaattgcttcatacactttctccacatccgcgcctgcccttgccgccagctgtaagccctctgacagagctgctatattcacggccacaatcatctgattcgtaagcttacatgtgtttccactcccaacattgccaaccagtatagctgaagccccaagtatatcaaaatacttactggcccgttcaaaatcctcctggcttcctcctgccataattgccagggtaccatctgctgcttttggttcgcctcctgacacaggtgcatccatcatgtggattcccttctgatttaatctttccgcaatttccctggacacctctggagcaatggagctcatatcaatgatgaatgtcccgcggttaccaaattccgcaattccaccatcacctaaaacaacagatttcacatgtgggccattgggcagcattgttatgatatcgtcacactgtccgaccacctccttaatgcttgcgcatccgatacaccctgacttttccgtcctttttacagcctccggcataatatcgtaaacataaacctggtatccgcttttactcaaattacacgccatatggtatcccataatacccagaccgataaatccaactttcatcatcttacccctattctatataacctgctatgcgcatctgctgttccattgcttcgattgcctgcttgtgccctggcagattcggtgtatagggttttcccacatccagccccagcatattggccaaatctttggtggccaccgggaaactggctttgtccatggataatctgatgggattcagtttaaactgcgctttcctcgccccgtccaaatctccctgcatataaagattgtaaatgcttgttactaattccggtataaagtttgcagttgttgccacacagcctgccgccccatggaccattgccccgaaaatcaaagtatcctttcctccaaaaaccttaaagcctatgtcggaggttcttcttatgaattcctccgtctgggtcatatcacctgaagagtccttcatacctacaatattaggcacctctctggccagacgctccaccaggttagcactcagggtataaccggtacgtcccggattattatataacagcattggggtatccgaaaccgcatctgcaatgcgtttaaaatgcagatacaactcctcctctgttggttttagaaacatgggctgaaggaccgatataccgtctgcaccagctgctgccgctgcttttgcaatgcggatacacttttttgtgctgattgcgccgattcccatataaacaggtactctcccggaagcatgattaagcatgatttttaaggctttcatcatctcgtcctcttctgtcatatagaattcgccattgcttccgaatgccagtatgcctgaaacgcctccatcaataacaaaatccacctgctttctcattttcccttcatcaatcacttcatttttatctactggtgtcaatataggtacaatgattccctttataaattctgtattcatatgtcttcccttccttttgcttgctcataccggagtacgctgttcaatttcccctgctatccgtacattccaaaatttgttttatatctgcaatatcccgttttgtgatatgattctcccatcaattttcaatgtgatatccctgataaccatatccatatgcagtggagcctccacattgcctccaaatgacaggttgtttccaattccgatatgtacggtcccataggccccttcatccgccagcatacgtccgcatatcttgttttcccgattcaccggaagtcccacttctccgatattatagacacggctatctttatactgttccagaatccgtctcaccgtatcagcttcgtttgttccggaaatcattacgatctgcccatcctccacatgcatggtaatgggttcccgtatcatgttcagactgggatgcggtatgcttccgtcaatcactaatactccctgggcagtaccctctaccggccccaaagcaatttcagcgttaggcggcgatgatgactgtcccgggcggatgctccttccataatcaatcacaggctcccttccctccacgctgcataccagatttgttcctcctggtgacgaaagttccactttttttcctctgaaatggggcgcaatgcggtttaatctttctgttatctccagaaaatcggctgtcagtccgccttcatggaacatggacggtatataatcaaccaaattcacataccggcagtgaccgttttgtaccaccctgcgtcttgcctgggaatggaacatggacatggatgtggccgcaaaaatcacattggctgtttccatggctgccgctatctccaccgtaggctcatccccgtgggatgccctgggcgtcatcactgccattgatgtctcattgaccttagaggcccagtcaaacagttcctttcctatctgaaatttgtccgtatccgttataatgaggattcgatcctcagattttaaatcggtaatcggtcccagaagagaccggattcctaatggcatttctcccatagctcctcctacattccaagatatattctgcgtatttcatcgttatccttcaattcctccggggcccctgatattaccgtactgccatcctgtatgacatacgcccggtctgcgattgcaagggtttcattaacattttgttctacaatcagtacggatatgcctgtctcccggattgttttcacaaactgcaacacctcttttaccagctttggcatcagacccagagacggttcatccagtatcaatagggacggatttgacataagacctcttgcaattgccaccatctgctgttctccccctgacagagtttccgccttttgctcggcacgttccctgaccctcggaaacaactcatagaccatgtccagggtcttttttatttcgtcctgatttttccttgtatatgctcccatggacagattttcatatacagttaattttccgaacagcatcctgccttccggcacaagggatattcccttttttaagactccgtatgcgggcatgcccgtaatatcttccccattgtatgttatggagccttcccagggttttaataaaccggaaactgtttttaatgttgtggttttcccggctccatttgaacccaggatagcaacaatctcctgatttccggcctggaaggatatatcattcaggaccggcatcattgcactgtatccaaatttcaagtttttcacttccagcataatcattcccccagataagcagcaatcaccttttcatcctttgtaatctcctccggtgtcccttctgcaatccgctgtccatactgcaacaccaggacccgctcacagattcccattaccaccggcatcacatgttcaattgccaggatggagatgcctcttttatttatcctttttaccaaatctatggcagcttcacgttccgctccattgagccctgccatacattcatccaaaagcaggagtttcggttttgtactgagtgcccttgcaatctccagacgtttcttttggatgacgcttagagaaccagcaagatggtccttcttactacccaacccaacaaattcaagtatcatatctgcatattccttggcctccattgttcccggaatatgaagcatggcgcccactgtagcattatcaagtaccgtcatggaatccatagacatgggaatctgaaatgtcctgccaatccccttctttgctctttcgtatggcggcaggcacgtcacatcctctccattaaacagtatggtcccagatgtagccggatgaatgccactgataagattgaacatggtagtctttcctgctccattaggtcccacgactccatacacctgtccttcttctatgtcaaatgtcacatctgataccgccgtcaaacctccgaacttttttgtcagaccggttacctccaatatactcatgtactatcctccctttttaatcgttatgagcccttagtcaccatattttggttacttacgtgcgatccatgtcatctccgcttggtgaggcctttcacgaattcagcggagcggcccgccgtcatctttctgactttgtcaatcagatttccagataacttcagaactccttgaggctggtacaaaattgtgagtatgattaagacgccatacaggaccaggtctattcctgatatggtggctccgatggtggccctggtatattcgcccaatggtacaataagggcagctccaattacaggaccataaattgttcccacacccccaattaccgccatgataatcattttagttgaaagggtgtttatgaacacagtacttgggtcaatataggtctggtacatggcatagaacgagccacacagcgacgcgatacatgcgctgattaccagggcaatggtcttatattttctggcattaatgcccacactttccgccgctgtctgatttgctttgattgttctgaagtaatatccgattcttgagctgttaatatatatcatgatggatattactatcatcagtatgactccaaaaaagtaataatagtgcagttttcccctgaattgcagggaataccaggggttcatcttcatattgagaaaatcaatccccatcattccttttgtaaaaggaaggttcactgctatgatacgtaccgtctctcccagcgccatggtggcaatcgcaaaatattgtgcgcttaatttaaaaataggaagagccaccaacagcgcaagaagtgttgcgaaaaacattccaatcaacataccaatccacggtgtaacattccaataatagaagggaagtactgccccatatgcccccaccccaaagaacatggcctgaccaagggatacctgacctgtatatccgccgaatatattccaggcagaaccaagacatgcccacatcagaatcagaattcccaaattctgttgaaaacttttggtgaatacatggggatacgcaactataatcagaacagtgagtataagataccatggctttatatagctgataagcagggcctctctcattcgttttccaattttcataagcatcaccacccaaacaggcccttgggccttttataaactacaaacaggaacagggcaaatactgccagatatttaagcgctgcattggtatatgtccccactaccgtatccataatgcccatcagaactccgccgataacggctccaggtatacttcccattcccccgatacagcaagctacaaaaccaaagttgatgaatacagaaccaacgcttggatacacataaaagtaataggacagtgccactccgccaattccggcagtggctgttgcaatacccacgcagcgcatgtatgccttttccggattgattcccaccagtgctgccgcatctttattcagagcggttgctttaatggctcttcctaactgtgtcctgttcaaaatgtaatacagagtaaccgcagtagctatacagataatgaaaggaaccagttttgaataggatatgattaagcctcctactgaaaatgagcctgtaaacacctgattcggtactgtcttaaaatcagaaccaaaagctatctgggcaacattaacaagaacaatgctgagagcatatgtgagcaaaagctggcttaacataggtgcattcatgacacgctttataagcaccttataaaaaacaattccaaaacaatacattaccaccgctgcaatgggaagacagataagtgggtccagtcctgatttaacgctgaaataatatgatataaacataccaagcatcagtatttccccatgagcaaagttaacgatatacatgactccccaaataagcgaaactcccattgctattaaggcaatgatcattcctgtaaatgtcccctctattaggacctgcaacagcaatgtcatagaccgcacctgcctttccgctaatttcgttcactccatgccggcaccgggattatagaatcagcactcttggcagaatccggatatactgtcacatatgcctgattctgaatctgggtgatgatacctgttgcctgagtgttttgatggctttcatcaaaggttactccggtccatggtacaatcagatattcctcattcatatcagtatcttccaatgccttaacaattgcatctgcatccgtacttcctgcccggttgattgcgtccgcaaaaataaggaatccctgggctgcgcgggccgtatttcccgtcatatcatgatttgagaatttttttgccagattattgatttctgtgaggtatggttttgtgttagccaagtccatactccaggcatttgccgtaaaaatgtaatccacatctttgccgcaggtatcaaaatactccgtggctacaaaaccgccccttgctgtgaaggtagctttcgggctgaaatccaaatctttgcatgtgttggtatacaggatagcctctgcggttaatgcataaatcagtactacatccggttttgcatccttcagtttaagaacctcagatgtaagtcctgtcggattgcctggatatgtaatggactggactatattgtaaccatgattctcagctgctgcttcgcacaattctttaaaattaacaccagcctcagcctcatccgctatgattgccacattctcaaatccggcctcttccctatagaggtccatatagttaaacgtatcttccacaaatgtagcatccgtaggtcctgtacggaaaaaatattttaacccgcgttccgtaagagtaggtgacgaagactctgcattgatgaagggaataccgtacttttcagccacagcactggctgtcttagttactccgctggcatcacatccaattaatcccgtcacgttttcttctgttatcaggcgctcagcttctgtggctcccacttccggatttccctggctgtctgctgctatgatctctattcttgcattacccagatttggaagtccctgggttttggcaaagggataatcaatatcatattcattattgataagctctgccatggcttttaatgtattgattgtctgatttcctgtctcagcgctcgtacccgtcaaaggataaactgctcctatttttatggtttgtttctcttcttcctctgtctgagaatcctgcgattccttgttttcggaagaatttccagttgtaccttggggtgcacatccggtgaacgaaaccacaatagctgccgctgtcagtaagcttaagattctttttctcattcccagtttcctcctgttattagtgtgtacgtttcctatagttcctcaataaactcatttatcagagccattccctccgctaacacatccattcctcttccgtaagacagccttacaaaatcaccataggtttcgccaaaggcttgtcccggtaccagtgccaccccctttttttccaaaagcgtttctgcaaactcatttccatccattcctgttttagatacattgataaagaaataaaatgcgcccatggaatcaacataacttagtttctgtatcttatccagttccgatgcgacgaaatccctcctctcctcaaaacggcctatcatatattccactgctcctgtacattcctctgatcccattccctcagccagcccctcctggataaagccgggtatacaggtggttgcatactggtggaccttcagtacagcagggatgaattttcggtggcaggcaacaaacccgaccctccatcctgtcatggcaaatactttagaaaacccatttaccatgattgccctgtctctcattccatccagggataaaattgaacaaaactttttatttccataggacaacctggaataaatttcatcagccaatacaacaaaaccatactctttagccaaatccgcaatgattgtcaagctttcccttgtaagtacagtccctgtgggattgttgggatttgtcaccaccagcatccttgttttctctgtgacagctgcctccaaacgttcccggttaatctgaaatccttctttttcctccaatgccaccttcacacacttggcgccggccatattgatacaattctcataattcatgtaagcaggggtcaatataataacctcatcagaagcatcgactagtgaaaaaataacatcaaaaatagcttctgccgcccctactgttaccagtatctcatccaccggatccacttctacctgatattcagtctttaacatggatgcaatagattttcttagttttaatgttcctctgttcggcgcataatgggtcatcttcttcctgaccagcgcatccaccgctgcggccacaatgggttgcggcgtatcgaaatcaggttctccaacctccatgtgaatgattttccttccttcggccgccattttgtttgccttttctaaaacctttcttactggcgaaaactgtactttttttaaccgctctgccggttcacatgcatttgtcattttagtaatcctccttggtccattcgtctcataataaaaggggcgcaaaaactcattatcgtttttgcgcctttgccgtcttatcagcctctttatcggtttccttcccacatggcagctccatgctgccccaggcgcctcatgacgtccactattactatggccagatccctctgattttttttgcttccacaacccgttttaccgcaatcagatatgctgccatgcgaggagaaatcttccgtcccgttgccgtatcccaaacgctcaaaaacgcattacccattatctcttccaatttccgattaatcttttcttcactccacattacttcctggatattctggacccattcaaaataagacacgataactccccctgcattggccaatatatccggaattaccacgatatttttcttaaataatatcttatcggcctcattggtcgtggggccattggcggcctccaatacaatcctggcctttacttcatccgcattgtccttgttaatctgattctccaaagctgcgggaatcaaaatggtcacatccagccccaaaagctccctgtttgatatgtgtaccactccatctgccctgtaatcctttaatagacggttttctcctgttgtgatgtatctgcagatatctggaatatccaatccttcctgtttatacagaccaccgctaacatcgctgactgcaatcacttttattccagcctggtgtaaaagcctagccgtggtttcccccacatttccaaaaccctggaccgcaaccgtggcttcccccctgcccattctcagaacctccagaacattgagggcagtaaacataacgcctcttcccgtggcatccttacggcctaatgcgcctcctatctccaaaggcttacctgttaccacccccggtacacagtggcccttcagcatactgtaagtatccatcatccatcccattacctttgcattggttcccacatccggcgctggaatgtcctggtccggtcctataatgggtgaaatcatggcagtgaaccgtcttgtaagacatctcagttccctctctgaaagtttggccgggtcaaccactacaccgccttttccacccccgtagggaatacctacaacagctgccttaaaagtcatccaggctgccagggctttaacctcattttggttcacaccctcatgataacgtatacctccctttgcaggccctctggaagttgaatgctgtatccgaaagccctcaaatacacgcacagaaccatcatccatctccacagggacagaaactttgagctccctttccggatatttgattgcctcgtattcctttggcgcatatcccaacaaatctgcggcttgacgcacaatttccaatacctcattataaggattataattgtctcccatttgcatatacccctttttatttattatgcataaaccggttcattgcttctgtttccagatattcccattgataaattgatttattttcttgtaaatttcagcaaaataatctataatctttggatgtaatatagttttttcatgacttaattatatctttctttatttattcgcacaaatgcatatttatctcgcaatctatagatacaaactatggttttttctgagatatgaagaagttgtttctatacaatttctaaaaagataaatcaggaggttagtcatgaatctgaacacactgtattactttaaagtattagcccagttgcagcactactcccaggctgcagaactattatacatatcccaacccagcttaagtcatgccatatcagcccttgagaaagatttaggggtacccctgtttcaaaaaaaaggacgcaatgtggaactgactaaatacggaaaaatatttagttcctatattacaaggggatttgatgaaattgaaaacggtgaaaaaactataagaaagttatccagaaatgattccgggatgattgattttgcttttctctatatcctgggagctaactttgttcccagattgctttcaaattttttaaaactggaaacctctaaaaatatcagcttttctctgaaacagaataattccagggtcattgtcgaaaatttgaaaaaggggaattatgaccttgccctgtgcacctttgttcctaacgaggaagaaatattgtttacccccgtacttcatcaagatttaatcctgattacagcgcccgagcaccccttatctgtaaaagaagaagtctgtattgaagaattaatctcatatcccattattggatataactcgaaagcgagcgaaacgcagaatgtaatttccaacttattcagcaccagcatcattaaacccaatattatatgtgaggtggaggaagagatgtccattgccggtcttgtatccataaattacgggattgcaattgtaccagacctggaatttttcaccaacttccccatcaaacgaatccctattaaacatgatcgggctcatagagaaatatatttggcagtcaggaagaaccggatatctgtaccttgtattgataccttttatcagttcattttacactatacccacaacgcagatgcaattgtttaattattgatttcatcacaaaataaatgacggtttacaggatcttttactcagtcctattaaccgtcattatttcgactagatgtactttgtttttctccctgtattcctcaaccactttctcaaagcattctgctgcctgccctctcaatcagcctctctatcccatcctcagggtaggacagaagcttcccgaactccacggcaatcctgtatctctcctgtcctgtataggcgtggtctgcaatcaatcgtttctgttgttccttcagtcccatatagcgctccagcacatcgccggtccggtaaaagaggtaattatacttacccttattcaactcctcggggaataaatccgtaataaaagcctcgtcctccggataaagcttcaccccgtacttcctgcacagcttttctgcatcctgcaggtaggaatcccgttcctccctggtatcgcaggggtggctcatggccagtgtcttaaggccggctgacaccatctcgcagaagcagtccatggctcccagcccgtaggaataggtgtcaattacatgtacagcctcgtccctgttcacaaactcatactcctccttgtccagagacaggggtatacccgacttactggtcacattcacgccgccataccaggtgctgtccaccaaaaagacatctccagcctggtattccatggaatattcatcattctttttaataatccgtatcctctgtccgtccatagctattttcccccagccacacattataataaaatatcggtattcctctattttatagccacccccagttcctatcaatccaacttacaaactgctccaaatttaacagcggcttattttttcacactatcaaatctccccccggcgtgatataatttaattatcacgttcagactgcggtcttagccttagaaagacccggtacacggcaatggaatgatatacggggggatgattatggtattaagatgtttttcggctccggatgaaaaggtaaatctctgcttttatccctgcagctgcggcaccggaccgggagaccacgatacatactgccaggaatcactgtgcatttatgatacagactatacaaagctcctgctgtcctatctggaatccgaattcccggaatttgatgtctgttgggataaccgcatacctgccgggacctggaatatcataatacagaaaatcgaaaatgacatgagccatattcatttcgatgatactgtctttgacttttacagccggttcatcagctggattgcagacgcactggagcaggaggacatgattatagtggaggggaaccagtaagaaaacgattgcagaacgaaactgaagaaccattgcaaaaagcggaacagccccatattttacgaagtattcagcccggtaataagcatgccatccgtatttaataactttatcatatatagcggggacaggaaccggccgtggccggttcctgtccccgctatactttccttaaaatttaccgccatatttcctcaacagccggcagtatataatccctgaccatcagccacctgttcttcgcctccggcacaaacccggacgcaatcgccaccaccaggttcctgtcaggaacccagcaaatcatgtttcctccatctcccatggcggcgtggacagccactccttttttctcaaactgccaccacatataaccatagcggctgaaggttctcttcacagactgacggacccatgattctgaaatgatacgcgctccattccacctgcccatgttcagatacagaaggccgaaccgcgccatatccctgggagtcatggtcagcccccatccgcctgcggtgacgccgtcaggatcgtgcacccaccccctgactccttccccaaacagactgtcacatgtataggtttccatgggataatccggaatcaccgtcattccaacaggctcaaacagatagcggtttgcaaattctctggtactcatcccaaccgcccgctgtaaaaccgcggacaaaagatgggctcctgccgtacaatattggaaatgcctgcggggtttatcggtttccctctcatccctcatcatatccagggtgaatcccacccagtcgggagatgtacacagctgttccaagggttccttccattcctcaaaagcatagggcaccgtcatagtcagcagattttcaatggtcacattcccgcagttcctgttatgtgtttccgaaacatactccggtaaatactccattatcctccggctgacagacggtatatatcccttgtccaccgcaatgcccgtcaacgcggacagcacgctcttagtcaccgatgccacatggaccggaacatccggtccaaagccatgaaagtactcctcacagacaatacagccatttctgaccaccacgatgccattggtatttgcgtattctgatgtgataaccgaacgcagtttttcaggtaatgcccggtccatgccctgctccccgggatctgttgtccgccactccgggacaggccaattttcattttgcatcatataagctccttcacgtttataggtacaccggtgtatgaaaaaagcatataatgattaaaaatgaaaagcaagaacatttttaaaaatgataacaggatactatataaggcactgcacgtcacaggacatgataatggggaatgatgtcctcataactcccatccttcataaggaatcctcctggtatcacgcccaactgtgtaaatccaagcttttcatacagatggagcgccgaagcattactcttcaccacagcgttaaactgaagtatcctgaatcccagctttttcccctgctccatgcaatgcttcaccaatgcctctccgatatggtgtccccgcagccgggatttaaccgcgtagctggcattgcagatatggccgcagcgccccacattattgggatggagaatatacagtcccacgatttctcctcccccaccgtcatacgcaatccctgtaaatgactgctctgaaaaaaaacggttccctgtctctgccgtaagaagctccagctgcggaaatgccgctccctcctccacaatatggttccatatcctgactgcctcttctgcgtccgcctctgtatacttccgtatcctgatatccatatctgtaaaatcccctttcctctatgtaaaatcattttccattcttcttaagcccttactccgttactataaacaattgcaggcggaaaatcaaggtactcggctctgttttgcggcattgacggtattctgaatgacgttaagaatgtcctgttaacattttccaataccttccagttgttcaaaaggactgcggcaacaatccattgcagcagtcctcttaacttttgttttttattttctgttttctgttcttcagcctttatctctcatcttctgtcttttatctcttatccctcagcataacatcatgtgccccgccttccacaatactggtggaagataccagggtgatttttgccttctcctggagctccggaatggtaagcgccccgcagttgcacatggtggagcgcaccttgctcagagtgaggttcacattgtccttaaggctgccggcgtatggaacaaaggagtccacgccctcctcaaaggacagcttcttatccccgcccatatcatagcgctgccagttcctggctctggcgctgccttcgccccagtattccttcatgtagcttccattgacattcaccctcttggtagggctctcgtcaaatctggcaaagtaccgtcccagcatgatgaaatcagcgcccatggccagcgccagcgtgatatggtaatcgtgtacaataccaccgtccgaacagatgggcacgtatacgccagtctctttataatactcatccctggcctttgccacctcaatcagggccgtggcctgtcctcttccgattcccttctgttcacgggtaatacagatggcgccgccgccaattcccaccttgacaaaatcagctcctgcctctgccaggaaccggaatccgtctccgtccacaacattgccggctcctaccttcaccgaatccccaaaattcttccggatgtagtcaatggtaatcttctgccactcagagaagccttcggagctgtcaatgcacagcacatccgctcccgcgtccaacagggccggcacacgctgttcatagtcccttgtattgatacctgctcccaccatataccgcttggagctgtcaatgagttcgttctcattctttttatgggtgtcatagtccttacggaaaaccaggtacaccagctcctggttcttattcaccagcggaaggcagttaatcttgtgctcccagataatatcattggcttctttcagggtagtggactcgtcggcataaaccaaattatccagcgttgtcataaagtcctttaccttagtgtcaggtcccatcctgctgacacggtaatccttattggtgacaatgcctaacagctttccgttgggctgtccgtccgcagtcaccgcaatggtggaatggcctgtctcctccgtgatggccagcacatctgccagcgtcatatccggcgatacattggaatcactcaccacaaaaccggccctgtaccgcttcaccttgtgaatcatctcagcctgcttctcaatggcctgggacccgtatataaaggaaatcccgccttcctgcgcaagggcaacagccatcctgtcatccgatacggactgcatgatggcagaaaccatggggatattgatggatatgtccggttctgttcctttcttatattttaccagaggcgtcttcagattcacctgggaagggatacactgggtggatgaatagcctggaatcagaagatactcgctgaacgtgcgggaaggttcctcaaaatagaatgccatgttatttctccttttcaattttatatttattctccgccgaaccttgtaactggtactatcatatcatgcccccatatcttccgtcaatcaatgagcggacgttctccgtcatgtattatcatatacgcagcagttccagtcagagcgtctctttgcctgaagtccggcccggccgtcagtccatatatacccgcgacccggtggcacccttctgcccctggtattttccattgtatggtttcagggctgtgtcatccatttccgcaaacacaagctggccaacccttcgtcctgccttcagctcaatggcacatcggtttgcattaaacagttcaagggtaatctccccctgaaagcccgggtccacccagcccgcattctgtatgaacagacccagacgccccagggaacttctcccctccacaaaagcagtcaggttgtcaggcagggaaacatactccatggttgtggcaagcacaaactggcccggaagaaggatgtatgtatctgtatttatggtcttgtacctgacctcatcctttaaagtaatgactcccgtggataaatcctccacaatactgaaggtattccccagacgtatatccacactggccggctgtacctgctctttatctaacggcgtgattgacaaggtacctgcctccagcattttaaatagtgtcctgtctgataaaatcatagtgtctccctcccatattaagcgttactatattttatcccataacccctgcgccggcaatataaatttaccaatcattattctccggcttccataaaaataaacagagccggttttccccaacaggaaaaaccggcccaatctgccgtcactctatttacagggcattattccgccctgcgttattctgtcttgcatttttccgccctgcattatgtcatccagcatatccttacactcatcatatgaatccacaatcaaatcagcttcacttacatcctgttggattcccgagccgcggtacgccgccacccgggctcctgccagcctggcagcgtgtatgcccacagcggaatcctcaaacacaatgcacttacaaggctccgctcccagataatccattgcctttttataacactccggatccggtttgtggttggcgcacatatcgccgcatatgacaacatcaaacagcgcggtcatcctcatccggttcagtgcaatcataatcagccgggtggaggtagaggtcaccagtcctgtcttcattccccgaccccgtatctcctgaatcagggataccacccccggcatggggcggatacagctgttttcgtatgtatttcccacctgccggcgctttcctgccaggtcctctgccgtgaccttgaccaaagacctggaaagcaggctctcgattctggctttgtcattggtaccgattaaagccttccggtcatcatccgtcagttggattccaaaggccgacagggccttttccagatatgcttcattgctctcctctgtatttgcaataacaccgtcaaagtcaaacagcacaaactccgttcccataggcgctccgtctactgtgcgaacagcctgcgggcattggtctgtatgtacgcaatctcatccctggaaaggtcgcagaaatcgctgttttccatggagcagttggaatcctggacatacatcatcttggtatccttctgggtgatggaatagaaccagcactctgccggcacattatacaccttcccctgctccatcaaagtcagttcaatcttaaacccgtcatccgccttcgctgcggtaatcagaatcgcctttcccgctgccagaataaactgttcatccgtagaatgatggatttccaggtgggcaataccgtcaatgtcattgtccggcttccagttcttgatactgacaagccacttttcatttttataaacacacaggataccttcaccattattttcatacacatccggtctcattatcatttcctcctaaattatgagcacttagcgcagtggctggttatgagcacttagcgcctgttcttcagactcttacgtgcggtacatgtcactggcacctggctcctatatttcagtcctcccaagaacaggcacgccgtagccaaatgccccttctttggcgcacattttagccgcaaatgcagctcccctctccattgcttccaccagtctttccttcatgcgctcctctgtaccctccaccacagcacctgtctgcgaggtttctaacaaagagcacaggaaggctgcaaagtaagaatcacctgcgcccatggtatcgatcacatcgtccgcatggacagcgggcgcatacaaaaagctgtcatcatacagtacataggatccgtcctccccaatggtgccaaggactaccttgactccataggactgtaccttcttcatctccgtttcccgctcctgcctggtcaaatgggcgcaggagagaatggccaccgtgacatacgggcacaccttctccagatacgcgtctgtccatctggtggaaaaatcataggcaatggcaactccggtttctttaagactctttaaatcatcttcgatgtaagaattcaaattagtataaatcagattaaattggctgatatacgcaaaatcctcctctgtaaaatcatagccatactccctggcgactcctcccttattggagcccagaaatacccggtcatttcctttcagtgtcaccagggcaaatccgttctcaccctcatggcagcggctatggctgtcgtcaatccctatctgcttcagtgtatcccggacacattcagccacctggtcactgccgtattttccaaggtaagcggtataagccccgttgagtttggcgtacacacatgtattgacacactggccccccgggtacatcctgcctctggaaaggtatttatcacagacattatctcccaccgcaattattttgtaatccttcatttcatttcccgctttcttttatttatatggattgaactgccggatgatttccgtggcccgcttctttcccctgtccatacattgggatatggattcccccaggcttacgccataggtaaatgctgcgatataggaatccccggctcccaccgtgttcaccacaggcaccttctctgcttccttttcatagaaccggtccccgtcataggcaaggctgccgtgttctcctaacatggcaatcacagtaccggtgcccttttttctcacttttaccatgaagtccctgatatagctgtcgtcccggtcataagagaaaaatgcgtagtcaagatagggcaatatcaggtcattgccctcctgctccagccgtttggaaaaatcatacacccaaatctgcccgggctgctttaactccttaatatagcggtcaatcctggaccagcgctcagcgtatacaatatcaaaggatttcacaaattccaggtcctctcctgaaagttcaatctcctccatggcattcccttcaaagtgaagatgcttcttatccccatccacaatatccatggtggccattccggtggggcggtccgcgcgtttcagaacgcgaagggctattcccctctccttcaggcgttcttccagagccatggcaaatacgtcattgccaagaatggtcatctccgtcacatcaccgcccaaatcccggtaattaaacgcaaaatcaatgctgtttccggtgaggtaataccggtccagcttatagtacacatcaatgcagttatctgccattgcaattgcccgcttcatgttctattccttcctttcccccacagcgtatatcatataatggcgcattttgattccgtcgtattcgcagaaataaatgtccgctgcatggcccagcttcagctctccccgcacaatgggaaatacacagtgatttcctgtcagcagggacttcagatgacccggtgtgtttcctccgatggtcccgtatgtgggcaggtaatggttatgatggtacggatagtcctccggggcaatgcggcttaagcattccataatgtctttttccacacagtccaggctttcattgaccgtgatgcccgtggtggtatgctccgtgatcacatagaccagcccgttctcaatcccgctttcttccacaaacgctctgacctcaggggtaatcttaatcatctcaaattcccggtccgcacagacagctgcttcctttagtttgaactccatctatctattcctccaatccccaaagggtatgcccggcatttttatgcatgtcccaaaaacctgagggcatttttataatatatgttctcaagggtttcggaagagaaccccagactgtccagtccccgcttgcaccggacaggccggattctgggcgaaccggagccaaacatgattttacgggaaatattatgctccacccacagctcccccatatcttccttaaataccttatggtatatctggtaagggccgtcaaaattcatcagcgccgtgcttgtataacaattttcatatttcagaagaagggcggctgtctcctggacccagggccatcccacatgggtcaggcagatattgatatccggatatctgcagcatatctcctcaaaatcagctggtctggaaaaccttgaaaatgcctgctgttccaggctaagtcctgagtgaaagataatcggcctgccaaattccctgcatatgtcatacagaggcgtcaatctctcatcatagggatacatgtgaagcctggccgtattgacatacaaccccttcagtcccagctctccaaatgcacgtctgagttcatccgccccatccttatttcccggatccgccgccgcaaacccgataaaaaaatcagaatcacaggctgccagctgcgctatctcatcattggatatggctggttcccctgttttagatgaattgtcatccggcagcatgaaaatcttctgtatatcggacagggcatactgcttcttcagcaaatccatgtccgaaggtcccatcagatgataattcatctcatcgcaccgttttctgaatctgtccctgtcctggcagattggtccaaaaagcgcggggcgtatatgcgtatctattaccatgtctgttgcctccctgtctatcgcatttccagcacaaagaaactgctccggctattccttatccatatgcatcctgtgcatcagttccctgttattcaaatacaaatccctgtatatgggatagtttctctgataaaattcatgtttttccctgtccggtccaataattcttccctctggaagtttctccttaagctggtgaaaatcctttaaacatcccgctcccagggccgccagcatggcatccccataggaggaacattggaatgtttccggtatatgaaggggcattccggtcatatcgcagataatctgcatccagacatcatttttcgtacctccgccggctgttatcagggtatgcggcggaagccccatttccctaaacagcatcagatgctgtaacgtggaatatcccacagcttccagcgccgcccggttgatatgtttcctcgtatgacttcccttcagcccaaatatcatgcctgtggccagcgggtcctgtatgggactgcgctccccgtatatgtaaggcagaatcatcaggccctctgagccgggctgaatttcaccggcttcccctgccatgactgcatatgcatttttcccgcccttacgttccatttccagctcttccccataaaaggtatcccgtacccaccgggtcagtgtaccggctgcgttggtgccgtcccccaggcagaacgtgcctggtatggtaaataccttgccgcctttaacagaaccgtttcctccggaggatatatagtcctgcaccatacgatccacgcagtagtaataaaacatggatgaaccatactggaaaaatgcggttcccggttctgtcagccccacgctgattgcctccgatgtggaatccccggtaccgcagataaccggtgttccctctgccagtcctgtctgagccgcagcctccctggtgacacggcctgccacatccgtggaatatgcacaggccgcaatctggtccggcctgcagtaaagtccgcattcctcctcattgaccgttccgtccgcccggtaaagaggccggaaggaacccttggccaaaaactggtctatcacatacctgcctgtcagctttgccgtgataaaagaacttcctgtgagaaatttataggtccttctgtatacctccggctcattgttcttaatccacagtatcttcgtggccgtgtcgccggaacagatgggatgcccaaacagccttcggacatccctgccgtaatgcctggtgagccactgtatttccttgtcagccctggaatcaatgccgtacaggatggccgggcgcagcggcctgcactgctcatccacaggcaggcagtccgtccccagggtgctggctccgatacagcttatctgttccggggcaataccgccggcttcaatcaggtgtctggatatcccgcagaaatccccccaccacaccttatctgcatcatgttcaaaccacccctgccttggatgactcattccatgggccatggtatgttccgctgtcaccctgaaatcttcccctatgagcattcctctggattcataggttccaatgtcaattcccataaaatattgtttcaatcatcacatctccttatgattccccgcggatctctttgacaatttccataaaatcacggacccgtttttcatccacccgctggttaaaaataccatcctttttaaaggctgatccaatgcatacagcatcacaatgtttcagcttttcccttacattctggtgattgcacccggtgttgcagaacaccggaacattcttctgcttcgctgcctcatggaccctggacagaaccacgtcgtcaggctctgctcccgccgctgcccctgatacgcagaggccgtctgcaaaatccccgaacataatggacctggccaccacctggatatcccgctgcacaaggtaggcatccgcctccggattcaccttaaacaggagcttaaggtgctccattcccagagcctttctgtgccggacggcctctccgctgttagagacatagaccccatactctcccatatatgcacctgaaaaacagctccgcccaaagcgggcgcctgttgccgccgccaggtcaatggtcgcaatgggattctttacaacgttgaccccaaagggaaccctgattctgtccttcagcttcccgattatgtatgccatggcagatataacggcaatatccgccacgggctggtacggcaggctgaactcgttggcaataagaatcccatccacgcctccatcctgcaatgccgtgaggtcgtgggccgcatggtccagcaccacatccatgtccccgcaaaaccccgggtcccccggaagggcatccagatgaagcagtgcgataatgggcttatctgctccaaacatgtcatgaatccacatatcatatctcctctattacatcccctaattcatgggtatttttcttcatccaggaaacgatgtcgtcgatagccttatccgggtcacagtaatatctgcggtcacagatttcaaatgaaacggttccatcgtatcctcttctcttgatggcatcgtaatactccttcatagggaaatccccgtggccgggaaccgtatgccccctgtcattgaagtgtatatgcataagccgttctcccagatggtcgaaataatcatccactgtctccccggcatacgtcatctggtccatatccaccattccaacgatgcagggggagccgatttcatccagcatcccggctatgtctttgcttgtaatcaggacattggtggtggtgaccttcagctcctccaggaaaagccggacctgtttcctctggcagtacacggccagctgtgccagcgactcccggcagtatttccacgcctcttccctgggctggtcaaaataaccgaagcctgtactgatttggatgttagggcatcccaggaactccgccgtgtcaatggctctctggtaatagcggatgctggactgccttgtcacaggatcctgggtacagaaatttacaggataaacacaattttcaggcgtcatagccattaccttcaggtttctctgcctgatatcccggtccagctcaatcagccggctcagggaataatcaaaaatgttaagctggggcgccgagcagtaaaggtcgatactgtcaaagggagagctctccactttgtccaggaacttttttatgggataacgtaaataatggtaattcattggagcaaatttcatataatgaggcctccttctatatcacaagctgcgctttcacaaaactggcagcaccggagcctgtcataaaacccgtcacggctccggctgctgccggactgcattaaaagattacgcttccaagaagcagggctgccgccacagataccactgtacacacaagtcccggtaccatgtaactgtgattcaggacaaattttccaatttttgtagttccggccgagtcaaacgcaatggcagcaacacactgtcccgaagcgggaataaagtaattggatgagcaggcaatccagccggccactatgatgttagccggaaggcccagcgcaataccgattggcaccataatcatggttgtggaggactggcttgtggtaatggctcccacaatgaatacagcaataatataaatccatggatactggttggtcagggccgacatattgtcagtgatgaaggaggactggtctccgataaaagtatttaccagccagcacaggccaaatgccagtaccactgcgaacatacctgtacggaataccggctggtccagaaccttgtcgctgtcgagctttgtgataagcaccatggctgcggctgccaccagcataaagatttcaataacagttgtcagcggtaatttgtttccgtcagcaagtgtaggtacaagaggcttcacagcgcccagcaaaacaatgcctgccatggcaatgaggaagattgccacagaaatcttggcttcctttgtggcaggtctttcctttttctctgcctttgtataatcctctatctgtcctgctgcaacacgggctttaaattccgggtcatccgccagttctttgcccttcttgataactgcaagcgcgcagaccacggtaccaaccagagtggcagggatgcagacaagcagcagggtaaagatattgacggagccatagcctgcggcctcagccataaaagcaaggactgccacggtagctgctgaaatcgggcacgctgtaatggcctgctgggatgaaacaatcgaggctgagatgggccgttcaggcctgacgcctgtctcaatggcaatctcattgataacaggaagaaggctgtatacaatgtggcctgttccgcacatgaaggtgaaaatataagccacaaccggagccagtacggtaatcatcctggggtttctgcgtagtatcttctcagcgattttaacaagatagtccagtccgccgcaggcctgcatggtggctgccgcacagattactgcaatcataatcagaataacggtaatcggcggatcggaaggtgttacatgcagtataaatgtcataatgaacattcctattccgcctgccatcgccaggaacgtaccaccaattcgtacccccagaaaaatgatagccagaacgataatcaattctatccaaaacataaattatcctcctaatcctttgtaaaatgtttcccctttatggtctaagaaatgattcaatcttttgttttaagaatggtgcgcacattcttggtaatacaaaagcaattcagttttgtatttctttgtattgctctgtattgttttgtatctaatacaatagtatattcatttaatagatttgtcaattgccatttatcgttttgtatataatacacagtttttagcattatttttgtgcatattatacaccctggcctgtatcaaatgtatcgccattacaaatatatttaaatacatttaaatacatttgtcccctaaccatttgtctgccgctgttttttcgcgtcttccatcatcagtccattatcctatgcgctctgaataccatgcaagcgcccttctcatggcatcttccggattcatgacatatctcctgtccagtatttccagccccagataccccttgtagtcaaaggcttccagggtatgaagcgcctggtccagattcaggtttccatctcccggaaccaggtgcccgccgggatttccgtccacgaaatgtacatgggccaggttctcccttcccagtattccgatgaatgtttcaaatgtatccactcccgtggtggcaatcacatccgtatccccaaggcctttgagggccggacttcccaccgtgcgcagcaggcgaaggagctggcttgcctcattgcagatatgagtggtgtattttgtgaatggttccagtgccagggtaacgccctcgctttccgctttccggcagatttgagaaaatgaatctgcagcccatttaaaggcatcttccccatccacatccagataggcaaacccggtggataccaccatgcagctgcaatccaggcacaccgccgcctctatgtgcctttgaaagaaatccacggtcctgtcacggtatctcttatccggatgggagacactgatgggataaacacattgctcaggcgtaaaacaggcaatcttcaggtgatggtccttaatggtcctgtttaattcacgcagacgtcccccatcaaaatcctccagatgcagatgaggcccggaagcccacagttcaacagactggaatcccagacggtttgcggaatccaggaagtaatccagcgtatatcgtttgtaatggtaatttgctgcgcagagctgagaaattttcatacattttcctccttgtagagcaaaataccccgcagtacgctgcggggtttgggccccgcgggcagagatccgggccgtatacggcttaaagcgtattaaaaaatactccggcacgctgccttcgcgggaatgaatatcttatcgttttttcgctgtagcttaatactccactttccacatgtagcggcgtgtcacaagcggatgctcacgcttttctgcaagggcgtggttgtagattggatatacgttattaaacagggagtggttaaaataatccaccacagaagcatcaatggtagaaaggcccaactcctttgcgtccaggacttcaatcctttttgcataggtacgaaggaactttaaggcccgttcatccagcggacgggtggagccctccgaaatctgaagcataaacggacggtttgcatctgttatctcaaacggaccgtggaaatactctccggtatggatgctgctggaatccagccactgcatttccataaaaatacagatgctctccatataggcagcgccgtaagcagccccgcttcccatggtatagattacaggatcgtttttatacgtttcggcaaactccagggctctctctgcaacatgggcacgtgcattcttaatgatattgctaatcatgcccaggccctcctggaacttgtcatagttttcatagccttctgtctgcgcagtcagttcaaccgccaccaaaagagcacatatggttttctcccccgcatagtcaatatcgcctttaagatggtccgggctggcgtcaaacgcataacggatgatgtagtcgccaaattctataatttccgattcctcaagccaggtcagaacaatgacagcagctcccttttcttttcccagctttgctgcctcaatggtttccggtgtattgcccttgtgacatgccaggcagatgatagaattttccccaaagtccctgggggtgctgtgaacgaattcattgctgttaatccaggcggattttatggaagcacactccttctccataaatgtcttagccggataaagagctcccagtgaccctccgcatcccacaaaatacaggttctttaccccgccctttgatttcttcgcttccaaaatttcagcaataatatttttgatatccgcgccaaagtatgccattgtctcaaatctcctttgcatattgtttttaattgtttctatatttatgataatacaatataatacttattgtcaataacaaatttaatttttcgcaattatatacaatgaggccaatttgtattataatataactgagtattataacttaagggtaacgcggaggatatatatggaactaaataatacaattgctacccctctatacaagcaactggaggaaaagctgcagaaagagatagaaaccggcgagcggcctgccggaagccggcttcccacagagaacgaattaagcgaaacatataatgtaagccgtgtcacggtcaggaaagctctggccggactatctgaattaggttatctttaccgcaaatccgggaagggaacatttgtcgcagaaaaaaagattcagcggggtatcaccaatggggttttaagcttcaccgacatgtgccgtatgatgaatgcatcccccggtgccaagatcacgaaaatagccctggaggatcccactgaaaaagagatggagctgatgtccttagacaaggacgaaaagatactggtattagagcgaatacggtatgctgacggaaaaccggtccagttagagctgaataaatttcctgagtctttttcctttttattcagcgaaaatttaaacgacagttccctgtatgagattctgaaaaaacataatataattttagaccattcccaaaaaaccctggacatcgtattcgccacctcaaaagaagccaaagccctgggaatttcaagcgggtacccccttttgaggatagaaagcgttatacacgatgtggataacacaattacgaacctctgccgccagctctgcattggggacaagttcaaatttattatttaagaaggttttcacgcaaaaggcgcccataaccgctggcagtcagctgtaatgggcgccttttcataagtttgttttattggtttttctgcttgttttattgggttttctgtttaaaaaggttttctgttttaaaaaggttttctgttcttagcagatcttctgtcggcatttgtgactgtcagttcttccggatattcttattcacaaaatcatctgcaaaccggtaatacatcttttttggcatatactccgccatggccttcacaagttttccggccttatcaggtacacagacaatactgcctttttcaaactccttcatggcctcatccactacctccccaggctgacggaatccaaacataccctttctcgtcttatccacatacattccgttattttcgtgaaaatccgtatccacaaagcccggacacacggcctgaacccggattcccgtgcctataagctccatgtgaagcccttcagtcaatgtgacgatgaagcgttttgcagcggcataggtgacattgccgggcaccactgcaaatgccccgtccgacgaaatattgatgataatgcctttatttcgctctttcattcctctcaggacataatgggtgatttctgccacagcaattgtctgaagataaataagacgcttcaatccatctatatccgtatcactaaatggggttctgaaaccaaagcacgcattattcaccagtacatgaatctcccttccctctaacgatgcaagcagctttcttaccccgtcctcctgagcaagatctaccagtaccacaattaccttacacgcaaacttatccctgatttcctgagctctcctttcaatcacttcttttctcctgccggtcatgattaaatcatatccttttcctgcgaaccacttggcataagccagccccagaccgctggttgcccctgttatcagtgcataatgtttcaatcttccgcctccttgattaaatgaacattgttcattcattatttaaaaaaagaaattcccgaaacaccggcaacgggaatccttctcttatctgccgtcctatttaccattccaagcgcgcttacgcttctaaaatacatttcataatcatgcggatgcccaacgctttctcagccgttgacaatccatcgttctccaggacaggaaccgcgccaaagagcatgtatgacgctgtcagcggtatattcccaacccttgtgattccattttcattcatctcccgcagcttttcctccatatacggttcaatggtctcacacagcttaaccgacataagcatctgaagatcgtgattctcctttttatgaaaaaaatgatgatacttttcctttccatctgtttgaataaacagctgttccattttgtccaggaaaccatccagcgaatcatccttctctttcagacgttcaatcatgggatgcgtaatatcctttacatactgctcaattgcagtatcatacagcatctgcttggactcaaaataccggtaacacagtcccggcaccacatgcatggctgccgcaatatctctcatggtagctgcctcataccccttttccataaaaacagacatggccgtgtccaatatttcctgtctgcggacctccggttccttggatattctggctgtcttgcgttccatctgtcaatctcccctttttctgaacagaatccttctgattaatactctgttttcattagtcagcagggttccatacctgtttcccaacaagctgaccgtctgctatatacatagaatatcactccattgaacaaaagtcaatgaattatattcattcatcagagcgaaaaccgagaaattattactttttttgttctatttttattccatctttaagattctatttccatttcatgaatatcgctatattccattttttatatgatatactctgtttatgaaacatacatatcctgattgcatggatatgataccataatttcaaggaggttgcgatggattatctgggtctgattcctttatttgttttaggtctggccatgattataaagccggaatatctctgggaggttgaacatattttcgcagtggacggcgtagggccaaccggtctttatttgacatttatccgggtcagcgggacattttttatgatttgttccgtggctgccgcactctatgtattgcttccgtagaggtgagattgatatatgatacgagcttggaaaggccgcggatttaaaagtctgcagcctttttcagtcctgtccccttccaactttcttcctttaatctttcaccataatacttcaaattcactccgcccctcatatgctgatacagaaaaactatatccttaactaacatacatgtttcacacaaagttcaaaattccctccccaggcttcatgttataatagacttattccaatgaaccacaggagggattccatgcgcatattagtgattgaagatgagaaacggctggcatttactctggctgacatgataggcggggcaggatattatacagatgtctcccatgacggggcagagggactggagcttgcacaaaccggcatttacgatgccattgtcctggatgtgatgcttcccggaatggatggatatgcggttctaaaaaacttaagaagcacccgcaacatgacgccggtgctcatgctgactgccaggtcggagctttcggaccgggtgaggggattagatgccggagccgactactatctgacaaagccatttgccaccgaagaattcctggcctgtctgcgcaccgtgctaaggcgccacggagatattgcgcccgacactctgacctttggcgaccttatcctcaccccctccatgcctgaacttatctgcggagaaaacagtgtgtctttaagcgccaaggaactggaactaatgagcctgctgatacaaaacagcagtcagtatctccccaaagaaaccatactccttaaggtctggggatatgacgccaatgtgaattccaacagtgtggaggcctacatatcatttctgcgcaagaaactctcgctgctgggatcctgtgtttctatctccgtcatgagaaacattggatataagctgggggtgtccctatgatacgaaaactcagatggaaattttcagccatcatgatgaccattgtcgcttttctgctggctgtcattttcataacgctgtactacacaacaaaagcaaactacgttcagcggagcatgggcaccctgcattccgccatgctggaaaattatccgggcagtatgcgggaacaggcagggcagccgccctctgcgggccagcgtcctccctcccgcccccgcaggcaggaacttcctctgatggtggttgatataaggcagggcaactatactgtagtaaagaaccagcttccagatatagaaagccaggaggccgaaaccctgatatccctggcggaaagcaagggcggtgagtccggtaccttaaaagacctgcacctgcgttttctccggggaaaaaccaagcctgaccaaacagtgcggtatgtattcgccgatatatatgaggaacagaattcactctattggcaggtgattcactcttccattatcggagcaagttcgtttgctgtctttttcctgttctccatccttctctccggatgggctgtgaaaccagcggagattgcctggcagcggcagcgccagtttgttgcggacgcctcccacgaattaaaaacacctctcaccgtcatcctctccaatgccgatatgcttgaaaaagaccgcgatataccgaagggacaaaaccggcagcggataagccatataaaggctgagtccctgcggatgaaacagctgatagaaagccttctcgccctggcccggagtgactcaggacaggagtctgcggtctgcgcaccagttgacctgagctttattgtaaacagcagtcttatggcctttgaacctctggcttttgacatgggtaaacacatcacctatgatatcgaagctgcacttcatgtaaatggagatgataaaaaactccggcagctgacagacattctccttgacaatgcctgcaaatacagtcaggataacggctccatctgtgttaccctgaaaaagaccagcgcaaaagaggcgctcctcactgtctcagatgagggggcgcctctcacgaaagaagaaatcaaacacctgtttctccgcttttaccgcggagacactgcccgcagcaatatccccggctacggcctcggactttccattgcccaaagcattgtatctgagcatggaggaaagattgaggccagcacggatggtttcgcaacaaactcatttatagttcggctgcccatataggaataagaaagtattcccggccacccggcatgcttcaaggcttcggcttactccatgctactgctgcttcccagaacatggataccttccggcaagctctcttccggcaaattccctgccagcaaagtctcctgtattacaacaacggaggctttgccggaaacatttccggttccttccgattctgattcactgccaatattatctgcgtttcccgcttccggctgcattttccgccttccctcccggcttcctccagtattctctccttctctaccttcctgtgttcttccgaagttttcctctccggttcctgctcccggcctttcttttaactttccttctccaccgcctgggattcttctaaaacctccgctggaaggcgtgccatactgattcaggatgccatccaccgccatctgaatatcctgttctccggcctctatgtaataagtctcccctgtttttaattctggcgagctgaaaagcagagcctcaaagggctttgaaatctctgtttccgtcaattgatttcccagcccgtcctttattgatatggttgttccggcatcctgcatttcatcaaagtaaaccatcagcatgggctgggatgaattctcagaaaacgtctggaacattcccgcacttcccacagccaatatggttcctcctgaaatggttcccgtaccattgtaatccaaagcaccatttcccccttctgccgggccttctgcgaggacggtacctccctccagatacaggtctccattggagtctataccatccccggaagcattgatcttcacgtttcctcccgtaatacggatataagccccttctgttgcaccaaaagaaccgccggctgcatttggaccgccggatgtatctgtaccccgggctgcattaattccatcatcctctgagttaatctgaatggttcctccagtgatttccaaacagagcccttccagtccctcgcggctttgttccacgattatggttccgcctgagacttccaccagattatcactgtgaactgcatcgtcgcctgcggacagcgtcagctcacctgagaacaaccttacattcttgccgctgtgtataccgtcatcctgagcatttatgtcaatgatgccgcctgtaacctcaaccagcgtttcggccagtattcctttctttcctgctgtgatggccgtggttcctccggtgattctcacatatcccttgtcttcttccccattattatttgactgtatcccgtcgctgcctgctgtaatggtaatctctccgccgttcacctctacggcgtcctttcctttcacgccatcttccgccgcctcaatgacataggtaccggaattaatggtaaggcgatcctttccccgtataccattcatataattaccgctgactgtcagcatgccgttcccctcaaataccacatcatccttgctgaaaatggctgcatccggctcgtcctcccctgtctgcggataagtatatgtatttccgtcagataccctgttttctgtcctatcctccaggacaatggtcagaagtccgctttggctggcatagattgcggaataatccgcacttgtaatggaaacgccgtccagtatcagacatacttcatcctcctttcccgcgtccaccaccacgcctccccctgtaatgtttcctgtcaggcggtatgttccggaagatgaaatagtgacattggctccgtcagccgcagcccctgtcccttcaatggccactgttgttccatttccagtgattcgtgtttcctctccatcaccaaaggaactgtctgcatctgtccggtttgtgtcctgcgtccctgccgcttcctggatgcctgctgtttccgatgttccagcggctcccgccttactcccattctgcccggctgtctttgtgcatccggcaagaaacagaacaccggccagtccggccgctattccatatatcttaagtttcctgtatttcagtccatttctgcccatatgattatcctcctataattcgtccctgccatccggcagccggccgcagacaatggtaaggttcccatttctgcaccgtatttcatccagcatgttcttttcaataaattccgactttaaatccacctggtagcacagttcatagagactgcccatattcacggtcctgacccgcacaagctctgactttttagcatacttcgcaaatatatcgtcaaaaatccctgaatagtccagattttccggtatcgtaattttcaattcctttctcccggccctgcctgccggaagggatatcaaaaggatggtaattccgccagacacaatcatcagaagcatagcggttcccagataccccattccagcggccagacccagagccatggccaggaatatacttccaatctctcttgcattgccgggcaaggacctgaaccgcaccagactgaacgctcccatgaccgccactccggtacccaggtttccgtttaccagcatgatcacggtctggaccataacaggcagcaggaccagagtaagaataaagcttctggaatactggttcctgtatgtatgaaccacagccagcactgcccccagcattactgatgtaatggtacagagtaaaaattgtcccattgtaataccggtatttacattttctgtcaacacactctcaagcacagattctacctccctctataaatatcccttgatacaggtactctttataataggcaccatattttgaataagacaccggaaaaagccccatatcggaaaaaagcctgctcatccataacggcatcgccccaggaattttcacctccatcagaatttggtccttatccaaaagcattgttccataaactccattcttcagatccagtccgctgcacctgcagcaaatattccggtcaaaggtaattcttaattcttcattgccctttccgtaatatgccgcccggtcataggccacaaaagccgcgggttttaaatcataccgattcaaaacatactctatttccttcaatatctggctctcctcaatccgccggattccataatacagatactttctcgcctggcagagaggcactggtatccggcgtttgtacaccaccccgtcaaactttttctttaattccgcatataccacgctggtgtccgtcgccttcccatatgccctcaaacgcagcttttctttatattccggtttttcaatggattgtctgaccagctggaaatccggtgtatcaaagtaaatattggatatggtatattccccgtaatggtctgtatccatctgtctttccagagcaggcatcaaagcatcatactgtttttgggtgagcatatattttttctcgtagcgtttgaatatttcctgagtcatacacatggcctccttcatcttttatggcttttatcctaacagcccaagctgaaacaaaccttaaaaaaatcctggaaaccatgagctttctgtgaacggtccgaggattttctgtgaactgacaggggattttccggagatttctatcaaatgccgaaatatctcaataaaccatcaagtttgcataagactatccccgattacaaaccaagcaaatatcttttaaaatacgggcgccgctgttgtggaagtcaaaaaacaccgccgggactccatccattcccggcggctttcctctcaccatctgcctacagactccagttcaggctcttaccctgaagctctgccatgtgatggtatatccctttcttctccaacagttcctccggcgtaccctgctccgccacataaccatcctttagcaccacaatccggtctgcgcctgccacagttctcatccggtgcgcaataatcagcacagtcttattcttgaccagattggatatggcctgctgtaccagagtctcattttccacatccagagacgccgtggcctcatccatgagaatcacaggggcattctttaaaagggccctggcaatggacagccgctgccgttccccgccggataaggcagaaccattttccccaatccgggtctcatatccgtttggaagacgatgaataaattcctcacactgggctgccctggccgcttccatcacctcctggtcagatgcgtctttgcgtcccagacggatgttctccatgatggtattattaaacaggaccacatcctggaatacaatggaaaagcttctaagcagggtctccggctctatcccgctgatatccgtacctcccagcgtaatctttcctctgtcaatatcccagaacctggcagccagctttgcactggtggattttccgcctcccgacggccctaccagagctgtcacctgtccctgtcttgctgtaaatgacacatcctttaaaacctgtttcccctctttataggaaaatcccacatggtcaaatacaatatcatatccatcgtacgcagcttccctgcttccctgctgaacaagctgctcctcaatccccttcatccgttccaccaccagtaaagcagagtacacagccgacaggttctgcagacagccggtaagaggtccgtacagcctggtggacgccaccataaacatgaggaacatcataaagccgatggaatgggatgacagaagagcagctcccgccagtaccgtggtagccatgccgactttcaggaacatctgggacgctgtgaccatggtgccgtttaacagttccagacgtatggtgatggattccacgttcagaatcttctggtccagccccctcagatactcctcctgctggttgttggccctgatgtcctggatattctcaatgcactcctggattccgtccgaagcagcgattttctttcccttctgcctgcgctccacccggtccaccatgggtcttgtacctgctgccagaagaaaggatatgggaaccacccacagcacagccagccccatccgccagtcagccgccataagacacactcctatgatcgccgtggataggaaggcccctatgagttcaggaataaaatgggaaaatgccttttcaataaacgcgctgtccgccataatggtggtggtcaaatccgccagatcccgttttccaaaaaaagacatgggcagggttctgagcctctccgccagacgaatacgcatattggcgctttccgtataggatgccacaaaggtagcgtcatactggattctccagaaaatgaatattataaccagcagtacaatgcaggctgccacatacccggccattcccagggaaggagcctgaatccccaccaacgggcccagaagccgttccataaagaggaacaggatgcccatggggaatatcagccccatattggtgagagcacaggaaaatatggcctttgtcagatcccttcctccctgttcgctcaaggcgaattttttctgcagatacttgctcatgcctttccacctaccttccactctgctgatgtctgataatccttccacatttttgcatacagccccctggccttcaaaagttcatcatggcttccctgttcagccacacggcctttctccatcacgaagatacggtgagcccggcacaccgtagacagcctgtgggcgatcattatcacggtcttgccctccaccagcttctcaaaggccagctgaatcagatattcattgtcagggtcggcaaatgccgtggcctcgtccaggagcacaatgggagcgtcctttaagattgctctggccagtgcaattctctgcatttcaccgcccgacaggtacacccctttggttccaaccaccgtatccagaccctggggcatcttcttaataatgtcctcacatctggctgccttcacggcccccatgacttcctccttatctgcctccggttttgccgcccgtatgttgttcatcagactgtccttaaatagatggctgtcctggaatacaaagctgaccctcttcatcagttcttttgtctccatctccctcacatccacaccgccgatacaaatgcttccctggtccacatcaaaaaaccttggaatcaggctgaccagagtagtcttgccgcttccggaagcccctacaatagctgtggtggctccctgcggcacagtaagagacacatgctccagagcgtttacaccgtccttgttataggaaaacgagacgtccttaatctcaatcctgtggttttcaggcttcctgggagcagcgggctcagaaagaggcttctctctgataacattcaatattcgctccagcgcgtcattggcagccatggtattttcactggtccacatgattttgtccatcatggtcacgcagacaggtgtaaacaggatatagaaaaccagatccagggccatggtcacaaatccctgcccgcccgccgcatcccctgccagaagaaggcccgcaggtatgagaacggcaaatatactgttaatgctgaccgaataacagcacatgggaattctgagggacagggtataattcacagcccagttcttatagcgcatgatggaatcatgaaagctcttaaaggaaaaaatgctctgctggaatgtctttaccacagggattccgcgcacatactccacggcctcgctgttcatgtcctccagggcattctggtactgcttcatgcactctgccattcccgtccccatcatcctgctgaggaaaaatgtacccaccgccatgggaatgaggctgataaggccaaatctccagtcaaacaccagaagaagtaccagcactgccgccggcgtcaccaatgctcccgccaaatccggtaactgatgggccagataagtctctgtctgtcctgccccgtcgtcaatgatacggcgcagttttccgcttccggtccccctcaaatagccaatgggcagctctgccaggtggtgaagggcagccgtcttcatatttctggctgtccggaaggccgaaagatgggtacacataagcgccccaaaatagataagcatgctcaggagtgaggaagccaccgccatccacccccagtaaaccagcgttccgccggccagtcctcccggccagttcaggaccgccagctttatcaccttccacatgcacagatacggcaccagcgctataaccgcgctgatacctgacagaatgcatcctgtcactgtaaggtatttatacttccctgcaaaggtcatcagagtcaccttacctgtatcgggaagccgtgtcataatatgtttcctgctgccatccactttttcatcctccttttcgttagtttcaactaactcattgttttaaaaataaggctgtcaggcttctgccttccggctttccgccctcaagcctcatctcttactcacccaactccatgattcgcacccagcccgcatgctgaaaacggcttaatgtgacagcacaggtaattgcctgttctctcggcaggtcgtgggacacaaattcatggagctgctggaaaaaggacctgcacagaatatgaatcagtgtgttgctcattccttcagccgaatgccccaaagattccatagcttttataaaatcccggcaggactgctcctccaccgcggccagcctgtcaaaataacggtccctggcttcctgggcgccgcagcacagaagcagcttgaacacctcaaaatgatcatagatataattcaccatccagggtatgtactgctctgtaatctcattcagcctggctggctgctgttcaggcggcagcgcagcaaagtccctgtgctctttacggtacagatccagcagttcctccgccgtatctgaggtcagcgcgtcaaacaatgctttcttccccggaaaataaccgtatatggctccggttgtcaccgatgcctcctttgcgattctcctgagcgacgctttctcatatccatatgtgagaaattccttctttcctgcctccaatatggcagtaaccgtaccgttgtacctgtcctccatgacaatcactccaaccttttcccatatcattataacactgttatataacatggttattatggtacaaaaaaaggcatccgtcaatacatataaccgataccttttctcattaaaccattttatatgtttttttgaaaaaacttctcaaaaccaatgaatgcagcgtactttctcagcccttcatccaccatctgtccgggaccagccatattgtagagggcggcttataagagccccaccagctccaggctcggttttaaagtatctgctcccggctgccattttgccgggcatacctgatcaccgtgctccgccacaaactgggatgcctgaacacgtctgaacagctcgtccgcattcctgcccacatttcccgcgattacctcgcaggcaacaatctttccttccggattcacgataaagcttcctctttcagccattccgtcagcctctatcatcacatcgaaatccctggccagactgcccgtgggatccgccagcatgggatacttgattttctgtatggtccttgatgcgtcatgccatgccttgtggacaaaatggctgtcgcaggatacgctgtatatctcgcagccggctgacttgaagtcctcatacttatccgccaggtcctccagctcagtggggcaaacaaatgtaaaatccgcaggataaaagaaaaatacagcccacttccctaaaacatctgatttcttcacttccctgaacgctccgcctgcataggcctgtactgtaaaatcgctgatttcttttcctattaatgacatattgtttcctcctggtttttgtgatggtttactgctgccttgccttctatcccgttacccttgaaacagaaatccattgcccgctgcccggttgttagctttgtctaatttactcatattttaccagaactaatcccttttgtcaataaataatattgataattattattaatattgtttattttgaaaaacataaaaagaacagccagacaaatttccccatctggctgttcccatgctgcgttattactcctcaaacgaattaatgacggataattccggcttcatatcatacttcttcttaaatactatggctcccacgattccagccagggtaccgctgatggcagccagcagcagcgccataagtacctttaacggcggattgaaggcaaagggcgccagcagtccgggtatgggagaagcggttcccggggcattgttgataatgcccaggaatgcggcggccactcccgaaaagcctcccccgaaaaagttggaacaataaatcggtatggggtgctttgttatgatatgggcctgtgtcagcggctccatcataacagctgccacgttgctgttatccccgaagtggagcattttaaagatgacaccattggtaaaggaaccgccgaagcaggcaatagctgcaatacccatgggcagtcctgtaagtcccagcatggcggtaagagccatggaactgaggggagacgtacaaatcatcttgataacccctcccagcagaagtcccatgagaatgggcgactgctctgtagctgccgaaatcatgccgccgatgtgcgccagggctgcattcacagccggatccaccaggaaggcgatgaatctggcaatcggtgcaatcatgagagcacccagcacggaatccaggcccggcggaaggtgtttctcaataaacggcgcaatgaagccaattgcatatcctgcgataaatcccggaaggatgccgtatcctcccagagcaacaccggcaactactgcaaatacgggattcactcccatgcctatcggtaccataattgccgctgccacgccgcccatgttgcccgatatggtgcccgtttccccaaggaatgccaggtgaagcaaatctccggatatgtacctgtggacagcctccacaaggaaagttgcaactgctgcattggccattcccgacatggccgctgaacctttgggcgccttcatactgaaaagtgagaaagctgccagcgtcaataatagtaatcctaaccccgtaataattgtcataaatctacgttcctcctgttttttgctctccgcagatatgcttggccgctttccaccacagaccgccgttaccgctgtgatagctcttaagctaaggtatatccttggtagagttttcgcaatgcaggtaacgaagaagtccccaaaattgcaaaaaaacagagacagacataaacgtagcgtagatgtctgcctctgtccttttacctgaaagtttccctgacgcggttgctgctatgccgccggttgcttcatcggtattcacattttagtgaccttctccagagtcccgtccgaattcgattcttttgcctgagagtttgcgcatccccttcggcgttacctggcggtaatctctcccgaattcatcaaccggtctgtcattaactttgtttatattttaacatcaaacatagaaaaaagcaatagaattatgttcagtttatttctttttcacaaaaaacataccgtttttttatgcatacggcacaatttttttcacaataaatgacagaaaataaacatatgtccatttactctcttccattcccaaaataattgtaaaatacaggaagggggattttattttttttctgtacgcgccttcaaaaatcaatccagaagattggtcatgctctttaaactgatagccagagtggatgtattgtggagcatagctgatgcggccggggttatgacgcctcccactcccagaagaataagacccaggttgaatccgataacaaaccggtagttccggtcaatccggtccatgagtgcccggctgatagccctcagtgtcaccagttggaacaggttgttctccgagatggtgatatctgctatctccctggcaatctcagccccttcgctgatggcaattcccgcgtcagcagccgacagggccggcgaatcattgattccgtcgccaatcataataaccttacggccctttttcttttcttcgtccacgaaccgggccttgtcctcgggaaggacctccgaataatactcgtccactcccacccgtccggcaacagcggcggccgtgcgctcactgtctcctgtcatcatgacaatcttggtgattccctgcctgtgaagggccgcgatgaccgcatccgcctcatccctcagagggtcctcaatgcagataacggctgccaggcttcctccgatggccaggtagaggtgggaatattccacgggaaggctgtcaaataccgttctcttatcctccggtatcctgcatccctcatcttcaaacacaaagtgatagcttccaatcaccaccctttcatctcccacataggtggcaatgccgtgtgccacaatataatccaccctggaatgcatctccttgtggaccagcccccgcttcactgcctcatttaccacagccttagccatggagtgggggaaatgctcctccaggcaggcagcaatgcgcagcagctcttcctttcccatgtcattgaataccaccacatccgccacctggggcctggcctttgtcagggttcctgtcttgtcaaagataatggtgtcggcagcagccactgcctccatatacctgcctccctttaccgtaatatggcagctgccagcctcgcgcatggccgagagcacagacaggggcatagccagcttcagcgcgcaggaaaaatccaccatcaggatggacagggcctttgtcacattgcgggtcagcagccacgtaaggatggttccgcccagactccagggaaccaacgcgtccgccagggtggctgcctttccctcagccgtggacttaagctgctccgactcctcaatcatggtcacaatccgttcaaacctggtgtcgcccgcagccgttctcacccgcagggtaatctctccctcctctacggctgttcccgcatacacgtaggagccctcctccttcctgacaggcactgattcccccgtcatggaagcctgattcaccatggcgtccccggaagcgaccactccgtccagaggaatcacatttcccatatggaccgttaccaggtctccctccctgatttttgaaacaggaaccagaacctctgtcccatccacattctgccataccccggcaatgtttaaggacatgctcctggcaaggtcgcccactgactttttgcgggtccattcttccagaagttccccaatccccagaaggaacataacagaacccgccgtgtcgaaatcccgtctcaggacagacacggcaatcgctgcggcatccaaaacctccacctccagcttgcccctgagcagacagcggactccctttagcaggtacctgacggagtgggcggccgtacaggcggctctgacagaagccggcagaaaggatttggcaaatgccctgaccaccactttccggaccagcttctccttgtattcgcggttcagggcccttccgctgttcttcggcaccagctcttccatccgctcactatcataagaaaacctctgtattccctccagtatgcacctgcggctgccttcatacaccacagcggcatccgctgttctctcatataccctgacattttttactccgggaagggtgcagagataataatgcagcaaatcagcctgccgtatgctcatatccttctgataaaaatgaaccctgacccttccccttatctcatgtctaattacaaacttcattgtttcaagctcctattttcaactgtcctggacacattttcagagtaaatgaaaaaattaccgcccggagatttcttccccaggcggattatacattacgctgtaaccgtatcagcagaagctgtctcatcttccttcaaatattctgaggtatgctcaggggactcctccctgctttcatcctcaaatacctcctgacagcgctgtgcattgatttccctggcctctgccagaatatcctcagcgttctcctggatattggaggcggtggtcatcacacagtctttagcccttaatccggcagccaggcagttgatatataactttttggcatcatcgcttcccagaatcttcacacctgctgttccaaacaggacgccgcctaaaaaaaggcccatttttttacatttaaaacaatcgatcattcctttatcctcctaaattatatgtaaacaatccttatcaggcacaaaagagtatgcagggctgttatgatgctgtcttggcctttacattcacattaagagaactgccctctttataaggccttactaacagatagatgaatacggccacggccccaattgccgcaacggttccgactccaaaggttccctctgtaaaccatctgccaaactggtatatgcacagtgccaccacatatgcaagtatggtctgataaccgattgcaaaccaggtccaccttgcattgttcatctcacgcttgatggcgcctatggcagcaaaacagggagcgcacagcagattgaacaccaggaaggaatatgcgctgacggctgtaaagctctgggccagtgttccccagatttctgatccgtcctcagccacttccgcaaaaccatagagaatgccgaaggtgccaactacgttttcctttgcaaccagacccgtgatggccgccacagctgcctgccagttcccccatcccagaggagcaaatatccaggcaatggcctgaccgattgacgccagaattccatccgacaaatcttccaccataccaaaatgtccgtccacaaacccaaagctggatgtaaaccaaataaaaatagtggacagcaggattacggttcctgccttcttgataaaggaccagcctctctcccacatgctgcgcagaacattcgacacagttggaaggtggtaagcaggaagctccattacaaacggcgccggatcccctgcaaacatttttgttttctttaagatgatgccggagcagataatggctgcaattcctacgaagtaggcgctgggtgctacccaggaagcgcctccgaacagggctcccgcaaacagcgcaataataggaagctttgctccgcatggaataaaggtggtggtcatgatggtcattttgcggtccctgtcattctcaatggtacgggaagccatgatgccgggaacaccgcagccggttccaatcagcatgggaataaaggactttcctgacaatccgaatttccggaaaattctgtccatgataaacgccaccctggccatgtaaccgcaggattcaagaaacgcaaggaaaataaacagcaccagcatctggggcacaaagccaagcacagcgcccacgccagccacaataccatctaatatcaggctggagagccagtcagcacagcccaccgcggcgaggaatccctccacaacaacaggtatgcccggcacttccaagccaaacagactccagccttccccaaacactccgtcgttagcccagtcagtggcccaggttcccactgtggtaactgaaacatagtagacaacccacatgaccgccgcaaatataggcagagccaggaaacggttggtgacgatatggtcaattttatcggagacgctcatcttctctctgctcttttttgtataacacctgccaataatagatgtaatgtaggtatagcgctcatttgtgatgatactctcagcgtcatcgtccatggcctcctccatgcgcgctgtgatgtttcccacatccggaaccatggtcatctgggccccaatcttgtcatcccgctcaaacagcttgatggcatagaaacgcctctgcgcctcaggcacatttcctccgatgcattgctcgatttcctccagagccgcctccacatcggcgcagaatttgtgtaccggtacagatgctctgctgtcccttgcaagctccactgccttgttggcggcctccatgatgccggtgccctttaatgcggaaatctccaccaccgggcagcccagctccctgctcagagcctgaatgtcaatccggtccccgctctttttaaccacgtccatcatgttgacagccatcagcacgggaatccccagctccattaactgggtggtcaggtacaggttgcgctccaggttggttccgtccacaatgtttaagatggcatccggccgctgggtaatcaggtagttcctggcgaccacttcctccagcgtgtaaggcgacaatgaatagatacccggaaggtccatgatgatgacatccttgttccccttaagttttccttccttcttttccaccgtgacaccaggccagtttccaacaaactgattggatccggtaagaccattgaacagcgtggtctttccgcagttgggattaccggccaaagcaattttgattgacattttcatatcctcctcattctcttattgagaaaatttatcaataaattagttgtagctaactcattcttttaaaaaaaagcagtttctactgcacttcaatcatctcggcatccgctttccttaaggacagctcatagcccctaacattcacctccacagggtcccccagaggcgccaccttgcggacatagacttccgtcccttttgtgatgcccatatccatgatacgccgctttacggccccttctccgtgaagtttaacaaccgttaccgtgcttttgcattttacttccttcaatgtgcgcatcttattaatgctcctttccttctcatacccgcggccagcttacaccataatcttattggccatctctttgctgatagcaacccttgattcctttacattgacaatcacattgccattgttagctgaaacaacagtcacactcgctcccggcacaaaccccatgttctccagatgacgctttacctcttccttgccgcccacccggactatggatgccaccgtaccttcttttaccaatgtcaacggcatacccatcactcctctttctgaacctgatgtgattctgtttcctgaaatttccatattgcagctggaaagttatggtatcctaactgcaaatttaggttagcaccagttaaccaaaatgtcaatcgttttttcaaattaaatgcggattttttgctatttcagtcctgacgctaatttgcgtttcctttccgggtatgataaaatagaaaatagccgccgcagactttgaactaactaatatttatcagtgggaggatttgattaaattgaaaatacaggaatcagctgaaaactatctggaaacaatcttgattttaagccgcaaaaacccctatgtccgctccatcgacatcgccaacgaactggccttttccaagcccagtgtcagcgtggcaatgaagaatctgcgtgaaaacggttatatcctcatggatgaccaggggcacatcaccctcagcagcatgggaaaggaaatcgccgaaaccatgtacgaacgccacaccatgctctcccagtggctcatgtaccttggcgtggatgaacagacagccgcggaggatgcctgccgcattgaacatgtggtcagcgcagaaagcttccgggccatcaaggaccatattaccaaggggcatgagcttccggaagacaatttataaggcacgcagtcagaaatattcctgctgctgtccctgttgttcttccgggttccccggaccgccggtcctgatatacacactttccggccgccccttggtggtggtcctggtcttatatgcaatcttcagatatccctcctgctccaatacagccagaaaacggttggcgctccgcttggtgatgcccagcctgagcgcaagggtcctggctgtgatttcctgcttttcggaggcgctgatagcagtaaatattttctttactgtcaggggtgaaagcttggactgcacgtccagcacctcactgttgtccacattaaggagaagctggccgcagtcccccatgggaccaataatctgctccctctcattgatcaggtatgccagagactgcttaagttcagcctcatggcaggcgtcaagagcatttaaccgggcctgtgaaagactgttcccaagaccgcagccgatgctgaaacgggcggacagctttttttccctcagaaacgggctgaggcggtcctccttaaaatctccggtccagcccgaaacatgtttcttggtagacacgatttccagcccgtaatggcgcctgtggaccgaacagtcaatcatggatgcccctataaattcaatcacaagattttcaagcctcatgtaatcataatccaggccctggaacatctcgccgccggaaccattttccgacagtttcacgatgatgactcccggtatctgctcctccagcttcctgcgctcaatctcattgagaagcttgtcgcacatctcccccacataccgtttgctggggaacgggaaatagaccttcacgccggcctcctgcagtgccggcacaatactggaaaaccgcgtgacggataaatcaatctttccttcctcccagagccttacatgtttcccgtactcctcctgctcaattcccagcatccgctccatgtcaaattcatccgctgaaagctcccggatatcgggcatggggctgcgcccctccacaaaatcctttagtcccactccgaagatttccacaatatcagcgtaaacccttgtaaaatccaggtttctgttctcatttaacagctttagaaataaacggtacagggcagcctcatcagtgttgaaaaaacagatggggcgcttttcttctttataataaagatgtatcatgtgcgcaggaaaactgccggaagtcaggatgccgtcaaactcctccgtaaccttttcatagatatactgtatatctgaaaatgttttatatgtaaatatgcaataatcaacgtccaggtccccaagcatggactggagaaactcttttatatattctgttgcgatgactgcaatctttctcttcaattccattcctcccaaaactgctttgtcttttatcttaacatagcaaaggaaaatccgcatcctccaaatggaaaaatccccggctttttgtcaattgtgcatataaatattttttatccccttgacaaacatggtctttttgctataataaagacgcgtctttatatagtctttttatattccaaggagggtaccgcaatgaacgaattcttacgacgagcaaaggaactcgaacaccagatgcagaaggaccgccgctacctgcaccagcatgccgaagcaggggaacacctgcccggaaccactaaatatgtcatggaacgcctttcttccatagggctttccccccgggaaatctgcgactcaggcatcactgccctgattgagggcagctgccccggcaagaccatacttctcagagctgacatggatgcgctccccatgaaagagatgaacagtcttccctttcagacagtcacggaggcggcccacaactgcggacatgacatacataccgccatgcttcttgctgctgcccagattctgcatgagcgcagagatgagctctgcggcagcgtcaagctgatgttccagccggcggaagaggtttttactggttctgagaacatgattaaggcgggaattctttccaatcccacggtagatgccgccatgggcatacatgtgatgttagataccccggttccctccctcaactatggcacgggcttcatgacgtcctcctgcgacggttttaaaatcacggtaaaaggtgtgggctgccatggggccatgcctcatctgggtattgatcccatcaatgtgggctttcatatttacagcgccttccagaatctcatagccagggagtgtgatccaggcgagaaggcaagtcttaccctgggtgcgtttaatgcgggaaacacctccaacattattcctgacagcgccgtactcatgggcaccctgcgcacctataacaaggatttgcgcgccaggcttgtaaaaaggatgcatgagattgcagaatacacgggaaaggtctttggagtggccattgaatacgaatccctctccgaggtgccatccacctactctgacccggctcttaccagggagctggcagaatatgcctctgaggtggttcctgatttcatcaaacacaccgattactccgtaacaccttccgatgactttgcccgcgtgtccgaaaaggtccccaccgtctacttcatgataggatgcagggtggatgggtgcacggttcagcaccataatccgggcgtattattcgatgaaaccgtcatgccctacggggccgcagtacacgcagcctgcgcatttaactggctgaacaggaggaacgcataatggaacgcaaaaaaatatactatggctggttcgttgtctttggttgtctcatgattacatgtaccatggtcccccccatcatggcgctcagcaataaattcctgatacaggttacgggtgagctccagatttccagaagcgcctttaccctggccaataccattctccagggtctcggaatcttcctgtcccctgttgtgtcggccaggcttgcaagaggcaacatgaaacggattcagaccgtcagcattatcggctttgtcctttcctacgcttccttctcccttgccaccaatgtgattcatctatacatttcctccttctttaccggtattttctttttaaacgcttctctgattccggtgagcatgatgattaccaactggtttgtcaaaaagagaggacttgccatgagcattgccatggccggaatcggcgtgggcggcaccatcttcagccctgtgatcacatggctgctgggggcatatggctggaggagcacctaccggatcatggcactcattatcctagtactggcccttcccgctgccctgttcatcctcaagaaacgtccggaggatatgggacttttaccctatggcagcgaggattccaccattgagagttcctcccttcaggattcatcctccagggatgctgcctccaaacgaatcccccaaaaggcagacgtggtgtttccgctgagcgtaaaggaatccaggacaaagctgttctttatccttttcatattcggcatgctgtgcaacggactgattaatacgggctccctgggccacttccctccggccatcgaggaacttcagggcccccaggtacaggcattaatcatctccctgtattccatgattggcatattcgggaagctggtccttggatggctcaatgacaggttcggcgttgtggccagtactgcttttggatgcatcacctttgccctttcctttatcttcatcctgtttggccagaatatcagcatgctctacatcatggccttcctcttcggcctgggagatgctatcggcaccgtcacccctccgcttatcacctccgccatctttggcgctgaaaaatacggcgaggcatacggaatcgccaacagctttacacaaatcggcctttccctgggagcgctcatggtggctgccatatacgacaccagcggctcctacaacacggcctggattctccttcttatcctgaccctgggcgccttcgccggctggataggcgcatataccgcatccagaaagtactgccgaaagcctgcggcgggcaatacgcagaatatgcaggccgcgcaataaaaccggaagcaaagcgccctcaaaccattcaagtatgcctgaatggtttgagggcgcttctttttcatttgtgcttctttttcatttgtatttaattctgtattccgctacataaagatgccggtatgccgcatgtaaaaagtgctggcagcttcagcctctggaacgtctgtaaaaacattcttatgacaacagtttttcatataattccctgtccccatccttaaacacattaaaaacaatccggtcaaaggccgctttgcgctgttttatgaatttcgtcactgtatccaccgcaatctcagcccccttatcattgggaaaatggaattctccggtagaaatacagcagaaggcgatgctccttaatccctggtccgcagctgcctccaggcaggaaacataacagtttctcaggtcctgtttcagttcttttgtcagcctcattcccaccacaggtcccacggtgtgaatcacataccggcatggaaggcagaaccccggcgtcagcactgcccttccgacaggctcctcataatccgggtcctccctgtgcctgtcatccatataccggttgcaggcctcacgcagcctcagacccgcagcggaatgaatggcgttgtcaatacagccgtggcatggcacaaagcaccccagcatacgggaattggccgcgttgacaatggcatctgcctgcagccgtgtaatatcgccctgccatatggatatacggtccccaaacaggacgccgcttccatattgctcctttacggttggtatgtcagccaggctcacaattcccttttccctggcttcctccctcaggaattcatcctgaatctccaggaatccggcaggcagtggcccgggcatacggatattcataagggaacgcatgaccctgcgccggtcccggggccttacctccatgtccctgaagctgaccgaatccttcttaagttcttccacaatatagttaagacgtgcttcctggcccatctgcttcatggctgacagctcccttctccccaaccggccccgtcattgcatcctgcgtctgttcctgccagatgctccagcacatgcgcgatgtcagccttcagcaccagtgaccggtccatgatgtcatccggcacccacgcctgctccagattgacgctgatataaaatgcctgtttccactgctttgtcattctccagaaggggtattttataatgccgggcgtgttcatacccacccctaattccaggaaaaccagtgttttttcctgattattgcgcagaaatgtttcataccgtaccgctgcccggtaccacgcctcatcctccacaaagttaccgtcgcacctcagatgtacttccatgtcgcctccgcacaccggacactttggcacctgacaggagggaatcctgcagtccttctgttccctcagcatggcccggatctgcgcctcattgtcatacagcttcttatggcatgcctgtttgcactggaacagcccgtagtctccctgggttgcaaatatacactcgtcctgaaaaccggccagccagaactggtggtccacattggtggtcaggacaaagtggtttttatccttcatcatggcatacaaatccctgtacagctttgccgccggcatgtcgtacctgttataataaatatggcggctccaataggcccacttctcctcctgggtgggaaacggatagaaccccgccgaatacatgtccctcatgccgtaccgttctatgaattccctaaaatgatcctcaaaccgcctgcctgcataggtcaggccggccgcagcagacaagccgcttcctgctccgatgacaacagcgtcagcctgctccagacgccgtttcagcgccaggagacaatccccagtattcaatatcatcccgcctttccagggcctccgcccaatctgactccattataacctgttggggagacgcggtaaactacgcactataaagtgccatggtatataaaagatactaaaggtatgccggcttccggacagtctctatgatttgcggacacctgtcagagtttctttaaccgttccatcaaaagcttcatctctcccatatccggctccgcggcatcccagtccccgccaaaaaaacggtaataggaaaacagctgctccagctgcagccagctcccgtccatagccgcagacaacagccctgcaatgcggttgaccatatatttgttcaatgtcttcatatcctgctgggacagctgcccattagcatgcatgtcctcaaccgggccgtttctgaacgcgtaatgagtcactgccttggaaatagcgtcaatattttctctcctgagcagccgttctctggaattttcgttcagctgtgcaaacagctccggattttcatccataaactgctggtatatcatatttttaatggatatcccatacttccttctcttataggccactttccccatagagaccccaaaccgttctgcgatctccctgtccgtcttgccttcctcatagtataaatgcttcagttcttcctctgtcaccctgtcccattgatattccatgtttttctccaaatcacttcgcgtatttaatccacttttgtacaggcggtaattccatgttccggcttcattttattataaccagccccaggtaaaaagacaagttaaaaggcgggatacttaccgcatcccgccttcctgcgtctccgtctgataatcacatacagataatatatctccactttttataatccctgtatgatggccgttaaaatcgaatcatacttgtcctccggcgtatctgtcctgctggtcatgaccaccggtactgtggtgccgttcaaggtgccggaagaaaccatatgggcaaaataggtcagcgacttggtaaatatattgcctgcgcataaatcaggcatcaaaaggatatccggctgtcccgccacctggctggtgattcccttatgcctggccgcatccgcgctaagagcattgtccagagccagcggaccgtccacaatacagtttttaatctgtcccctctgagcagccatactcagcatggccgcatccacagtagactgcatcttgggatttaccacctccaccggagtgataacagccacctttggacactgaattcccagttttccagccagcttcactgcgttgttaatgattttcaccttttcgctgtaatccggcgccacattgaccgcacagtctgtggcaatcatcaggcggccctggtactccataactgtggcctggcttaactggcttccatccggcacgaaaccataggcctccttatccagaatggcccgcatgaagctagcggtctgcataagtcccttcataggaatatccgcttctttatccttcaccatcctgcaggccatcctggcagcttccctctcatcctggcagggaataatagggtaatcttctgccacttcccccatttcggccagcagctccctgattttgtcctctttgccaatgagaataggctctataacgccccgcttcctggccgtgacaacagcttccaagacatcttcgtcatgggcattggccagcaccaggcgttttttaatgttttggctcttaatataatcttccatttcctgaaaattatgaaacatactgtacttcctcctggtcatcaaccctgttattcattcagttcctttatctcctcttccccacgcagtgcagccagtgtgttaagtcccagtgactgcatttcatattccccgggataaactgcaatgggagcgatgaaggaaaccctgcgggaaacgctgtccacaattctttttgagtgggcaatcccgcctgtaaatacgatggcatccacctcacccataagcacggtggctgccgccccgacttccttggcaatctggtagcacatggcgtccagcgcctcaccgcaggcctggtccccgcctgccgccctctcctcaacggtctttacgtcattttcgcctacatatgccataaggcccgcgtttccgttaataagcctgcggatttcagaatatgtatatgttccagaataacacatattaatcaaatctccaatgggtaccgaacagcacctgttggtggaaaagggtccgtccccgtctatagcattgttggcatccaccagccttccttttttatgggcggcaatgctgatgcctcctcccatatggatcaccaccagattcagatccctataatcctttcccgaatccttagcatactgcctgcccgctgctctgtggttcagcacatggaaactgctgcggcgcttaatctggggcagtccgctgtagcgggccagaggctcaaactcatccgtagtaggcggatccacggtaaatgcctggggaccctgagctgaaaactcataggccagcttaaggcccaggtccgtggcatgattgccatatttctcactggccgactgctccagcatctttctcgtaattcggtaaacgcctcccacaatgggctctgtgtgtcctcctctggtgaccaccgcgtcaaggccggatatgaggattcccttttctttcagataagcttcgatggcctgtttcctgaattcaaactgttcccatatagttgaaaatccttccagtgccctggcagtatggacgatgttgtccttgaacacgcagttctcattttcgtaataggcaatcttagtggaagtggaaccaagattaattgccgcaatcttatatatcctcatatgcatacctctctcctgttcttcctaaatgatatgaagcccgatggccccgtacataaaggctaccataatgggaatccaaagcaccgctatgacaaatcccacctttgtcatctggcccagcctccaatagccgtagtcgtaggtggccatgggaatggggtccaggggcagaaggaagatacatttggatgtgtaacccagtatcaataccagatacatgggattgattcctgccttgtctgcaaggataacaatgagtggcacgcacactgccagcaccgcgttgcctaccggtaccaggaaatgtataaacaggccgaaagcagtcaccaccagcataatggacagcatggaacttcccaccagaccgcccaggaactggttgctgatccattcagcgctgccctgctggctcaaaatcatggcaagggcattggatgcgcctacaatcaaaagtccggcccatccggtggcgtccacggcctttttccagtctattaaatccaccttaggcaggaagaacaccgcagaacaggtcagtgatatcagggttaaatccagctttgtccaggtctgggtaagccatagaagcaaggtgataccgaatatgacagagaacttcttctcatcgccggtcaggcttcccagttcctttcgtttctctttaacattatccagcccctgcacctcctcgatttctggtttcaccatcacagtaaggatgaaccaagcgatcagggtcagcaccacggccagaggagcgcctatcagcgtccattgcaggaaagtcacatcctggcccgctatgttcttaagcaggttaatgcacagcacattgattccgctgcccacaggagtggcaaatcctcccagacaggccgctatgggaatacccatcatcatgcttcggccaaatttggacttgccgggcagacagccattctcctttaacagggtataaccaattccgctgagaataatggtggtggggatatccgccagcaccgtggatatggcggcagagcatatcatgaagctcagcagcaccatcttactcttctttcccagcatgggagtgatgtataaggatatcctgtatcccagcccgcagtcaatgaatgccctggcaatgattccggaggacagcataaagaagatggtggttattccaaaattctgcatcaccacatttgtggtctgtatgccggccaggccgggtataaacagcagcaaacaggatgcgataccgataggtatgaattcagtgacccaggtaatgatggcgcacaccatcaggacaatggctctccacccttccacactcaacccctccggaggagtcatcctgctgcagaccacatagagtaaaatcgtaattatcatccaaacatattttctaaccccgtttttttgttccataattacccccttacggcgccccgcggatgggcgccctctcttattctgctcccagctgctttttatagttttctgttatatattcctggaatgactttacctcttcctctgtgattcccttaaaacgcttctgaagcttcaggtattctcccagtggctttaactccttgggctttactgtcacccggaccttgccctcttcgcattcatagagcacccaagccccagtctgaacagccagcctggccacttccacactcttagccggctcatatccccagccggttggacacgggcagaatatatggagcagacgcggccccctgatatcctttgccttctgcacctttttgcgcaggtccggtatattggcaatgctggcagacgcacagtaaggaatgccgtgggccatggcgattccgagcaaatccttcttacacacgctctttcctccgggtgtggtggtggtccaggcccccaccggagtggcggagcttccctgaatgcctgtattcatataagcctcgttgtcgtaacagatatagagcacatcctccccccgctccatcataccggacagggactggagcccgatgtccagggtcgccccgtcgcccgcaaatgccaccacatgggtatggtcatttccctggaccgcatatccggcccgtatgccggtggcaatggcagccgagttctccagatttccctggaaagcagaaaccttgattcctgtctcgcagccaaatccgcagaacagggcggaacatcccggcggtatgaccagggtggtatcctgtcccagcacatccagtacattgcggatgatcagttccatcccgcagcccgcgcaggcgcttactccatgagccacatatccttttgattctgtccttatatctatcatgctttacgcacctccctgattcccattgcatgctctgtatcacagtcaatccagacgggttcctctgacggttctcctgtcagtatgtcctcgtacaccctggttatggtgtccaggctgatgtccctgcctgccaggcccccaatataattcttgacaaggcagtctccgggtaaagccgactttgtctctgtccaaagcggcgtaccctgtcctccaaacccggtggtgcggtccagaacagccaccttcttaatgtctcctatgacgcttcttaacttcctgtatgggaatggacggaaggataccaccttaaccacacccaccttcctgccctgggcccgcagcttatcggatatatattttgccgttccggccatggagcccatgcatacgataacggattctgcgtcctccatgttgtagccttctaccatggatttcctgcgcccgaacttcctttcaaattcctcaaacacctcttccatcacagcctctgcattcacaaaacccctggcctgctggtacttcatctccgtgatctcattggaacccgtcagattgtcgataacaagaggatcttcaggatccagatacatgttctttctgcagtattcacccacaaacgcgtcgatttcctcctgctccggcaccaccagcttctgcatggagtgcgaaagaaagaatccgtccagacagaccatggccggcgtcagcacccgttggtcctcagcaatacggtaggccataatcatagtatcgtatatgtcctgaacattctcgcagtacagctgaatccatccgctgtccctctcagccatggaatcctggtgatcgcaccaaagactccagggtgaagccagagaacggtttaccacaggcataacgatgggtacccggcagccggaaaccacattcagcacctcatgcatcagggccaggcccacagaggctgtggctgtggcacaccggattcccgtaagctgagcgcccagtgcgcagctcatggccgtatgctccgattccacccgtatgtattttgcatccagttccccgctgtcgcacagctccgacagtttttccgcaatggtgctctgaggggttatggggtaagcggaaaccaccttaaccttcgccatcctgatggcttccaccgctgccccgtttccatccaacatcttgtaatgagccattattccacactcctctcatctatcatcgcaatgcagtgcctgggacattcattggcgcagattccgcaccccttgcagtaatcccacatgatttcaatgcattcccgtttctctttgttcactgtaattacattagccgggcagtacatggcgcaggtgccgcatttgatgcaggcatcgtagtccacctctggccgttccagcctccagcttcccgtattgccggagtcaaatatgtaggcgcacggcccctgtacgttacatctgtcttgtctggttgtagctgtctcttgctgcttttgcatttttcgcacctgccttctctccaaaaaattcaatcaacgccttctcaacagattcaatggataccacaccggtcttggccagcgctcccagggtggaaccattgggaatccccttccctatattgtccaatgccacctgggtcgcattgacataataaacggtcctgaacggaaatgcctcctgatacttccttgccacagcctcgctggacgcgttgagaaccagtatggtttcatctgtaatgcccttggacacatccacatgcttctgtatgattgtctcatccatcaccaccacaatatcgggcgtgtatacaaagcagttcaccaatacaggcttatcgtccatgaccacatcggtgaacaccggagcccccctccgctcatgaccatacgccggaaccgtgattgcatacttgtcttcatgcagtgacactgctgaagacaagactttgcccgcagtaacaacaccttggcctcccagtccatagaattttaatcttttcattatgattcctccttatagtttctctatatgaaatattatttctttatatgaactatatgaattataggtctatttgctttatttgtaaatatacaatctgcaatattaatttttttcattatttttaacaattttttgtcttattttcataacatccctccggttttttgtgaattttgttttaatatatgaattactatttctttatatgaaacatatctttttttcataatatatgatagaataaaaaacacaaatctaaaggagggagagtatatgtccgaacaaacctcagatgaaaaataccttttgcaatccgtaaataatgcactggcaatcatagatgtgctttgcgaacacgacaatttaggactggctgagctggccagttacatgaatctgggaaaaagtacggtctttcgcctgctgtatacactgcagcgcaagggctatgtatccaaggaccggaattcaaagtatcatttaagcttcaaatttgcccgcatcggaactattgtcaccaaacgttctgaactgattgagctgatacatcctttcctgatggaactgtctgcgctttccggcgagacagcccatctggtcacctggcattctgacactgaaattatctttgtcgacaaggtaatcggaactgccaccataagcatgcagtccatggtaggatttacccgtacagcccatatgacagccacaggcaaagccttgctggcttattcctcaccagaggttgtgggcacctacatggaactggcgccgtttatcatgcagacgcccaaatccattccttcccgttcagagctggaacggctcataccccaaattcgcgcccaggggtatgcctgcgatgatgaggaatccgagacagggctcacctgctatgccgcccctgttgtcagcatggggcaggccattgcggctatcagtatttcaggcccgtccactcgcatggagcttaaccgtgaccgctatgttgccctggtaaaggatgccgccctgaagattggaaaaaaattaggttattaacagatttcagacaaaaaacacccccggaacagacagggaatccatttcccttcccattccggaggtgttttataatatgttttcattttatagttttatcctgcagtttcatccttacaaacaccaaaagactgtcacagggaatgttcctcctccaaacggaatatacataaccatatcttctgcaaacttcgtataaaggaggtttttgcccatgtgcacagctatggtcacacagacgtcccagggggacatttattttggccggaccatggatttctcttatccccttgagcctgaactgtattttgttcccaaaggctatcaatggaataatatcatgaacacccaccaggtccgcaaccgttaccgtttcatgggaatcgggcaggacatatccccggtggtctttgcagacggggtcaatgagatgggcttcggggccgctgtcctctatttccccggctatgcccagtatgatgtcccggaccctgaggattcgtcccggcctgccatcacagcactggaactcacgggatttctcttaggtttaagcgcgtccgtggaggaagcagcatccattctccgcaccatccgaatcgttggcgccgaagactccataaccggaaccattgccccgctccactggctcgtggcggaccggaccggcaagtccatggtcattgaaaagacagctgacggcctgcatctcatggataaccctgtaggtgttctctccaacagccctgacttccagtggcacctgaccaatctgcgcaattacatgaatctctcccccacacaggagcagtcacagacctggggcagcctggagctgacccccttcggacagggcggcggcagctttggcctgcccggtgattatactcctccttccaggtttgtcaggaccgcatttctaaagactcatactcccattccggcaggcagggatgaagcggcgctgacctgtttccatataatggaaagtgtcagtatcccaaagggcccggtcatcacaagccggaatacaccggattatacccagtacacagccttcatcaatctctcctccagagaatacttcttcaaaacatacggcagcagctgcatcacctctgcatcactgcccggcaatccggatgcacaaaccggcataaactcgttggcagcccttaatcagcccgccggcttttgccagctacccgcgtctcaggacgcgatctaatacctggtaaagatattccacatccacaggcttggtcacaaagccgtccatccccgcctcagccgccgcgtctgcatcctccttaaaagagttagccgtcatagcaatgatggggatggaaacagcgtcctgcctctgtattctgcggatggcgcggcaggcttccaggccgttcatctcaggcatctggagatccataagaatggcatgataggttctgggactgctctgcatgaacagttccacagcctgttttccgttctccgccctgcgcacgctggcccccttcatcttcagaagctcagtggctatctctgcattcaggtcattatcctcagccagcaggatatttatgtgctccaggcagctgctttccacccctccagccttctgtttctcctgttttatctttatttcttcttccacattcgaatccgccagggaaaatgcagctgaaaaatagaattcgcttcccttgcccagctcactcttaagcttcagttctccccccatcagccccacaatggtcctgctgatagtaagtcccagcccggttccctggctcttggaataattgggtcccacctgctcaaaggctccgaatacgcgtttctgattctccacagatatgcccacaccgttatcaatcacctgaaacttgtagatcacctgctgattcgtgcttttggtccgggtcacacgcatgatgatactgccgcctgccggtgtgaatttaaaggcattggaaaccagattggtcagaacctgctggagacggataacatcccccataagcgtacggttttccacgtccttttctacagtgaactccaatccgcggcgcgtagcctctgcggtcagcatgtcctcaagctcttccacggcccggttcatggaaaatgcctcatttgacactgtcattttcccgctctcaatacggctcatatccaggatatcgctgattaatctcagcagatactgggatgaggaccggattttccccaggttttcccttacctgttccggtacatcatccatcattgatgttaagtcgctgagccccacaatggcattcatgggcgtacgtatctcatggctcatcctggaaagaaattcaccctttgcgcggttagctgcctctgccctctccaggctgctctgcatcctggctgcccgtattctggaacgggcagctgccattacaagaatcatcacggcaaggaaaacacatgcagtcaccgttacaaacatcactggattggcatacattaattccacaattgatgcagatcgggaccctatggttatcatattctggtttgtcaatgccgtcttctgttcactgctcaggctgttgaccgacttattcaatattggaagcagttcgccgtcaaccggcctggtcactgcaaaacagatatcatttctgttattaaccagggtattgggaacaacattgggatagtggtgtgcctgcatatcgtgctcgattttggtggagattccgtaaaagaaatcaacctccccattgttcacagcccgcaatgccgccctgacatcaggaaaatatctgatctcatccgcctttatacccgttggcatgcgccgcccttcaatgaccgctcccaccaatccatccgagggatagctgacccccttattcctgacgataatatcactcatggatgcatatgccttggaaagagccagccccatgtctgccccatcctcctcagatcccagaaaagctcctaatatatctgccttgccctgatttaccagattcagcgcatccccataggtgtccgtatactcgtagctgaattccagccctgaaaattcagttaccttctccaacacatccggtatcaggccgttgtgcatatccgtatcttcttcctggctgaacaggggatgccattccttcacaactgcaaccgataccttttgtttttcgcggatataggcctgctcctcatcattcagacagatgctctcaattccgctgtccggaaaatttgcattataccgttcctctgcgaaattcggattagagtccacaatcttgcccagggccatgttcataccgtccagaacctcctgattatccggagtggtcacaatataatacggctgggaatcaaattccgcaactacccggaggttcccctttacatctgcattattccccaaaagcatatccacttctctgtcttcaagacactgataaaggttcccatccaccaactggtctttggaaaagtacctgatggtacagtcaattccattgaggtccagaaatgcctggagccttcgtatgttttcctcagcccgttcatatactccgatcgtcttaccgctcatgcttttccagtcataagtcttaatgcttttatcatcacggcggaccagcagcacggatttattgtaacctgtattgtagtccggataggcaaaatactgttcaaattctggctggtaataggttccgcccatcagatcatactgcccgtccagaaattccggaattatgtcctctgcagccgtatcaatatactcatactgccagcccgtatattttgctatctcattgagatagtccaccacaataccgtgtctggtcccattctcatctgtctccgacatccccttcagctcagggtaggccacccgcagtatcctgtccggtccctgtgccttatcctgatcccccgcacctgcctgcgcatcgctgcatggcagcacagacaacaagcacccaaagaccaggatacacgccattcctgctatcttttttcctgcttgtaatgcatttttcatatcagagctccttcttttgtcccatttccgctgtacagcttgctgttatttattttatcacgtattcatctgacttgctatcccaaaaatggccgccctgcagattaaacagacatagcgcagtactacggcataaagacaaggcccctggcgccgccagggcgccgccaggccgcagccggccgccaaaaaagccctggttttccagggcccggcatgataacttttctacaatccaaaacatccaacacctcacagaaacaatccgggtgcggtcaaaatccgcctctacctcattccagcctgtctcagcatccaggcaatcctggcactttcctccagctcttccagacagaagaaggcatccatcagactttttcccggcaccactgccccatgctgtttcagcagatagccgtcgctgtccattacacgctgttcaaaggcgtcaaacagtgcctgggaaccaggcttctcataaggaaccagtcccaccttacccagcttcatcttcagatacggggtatgatccggaattacgtctgtttcgtcctcagcaggcacaaaactccacagtaccccatagatgccatgggtatggatgaccgcgcctgttcccggtttcttctggtataccttcaggtgcaggggccattccttgctgggcttgctgccgctcagacttgcgccattcatatccatgactgcaaattcatccgccttcagggtgccaaagcagcttccgctccggctgatgtacatcgttccattgtggaaaaagctcatattggccgatgaaccagatgtcttgctgcgctcaaacaggctccttccaatccagaccgcatcctctaatttctgcgctaactccctatccatcattttccatcctccgtctgcgtcatctccaatactctcacaaaaaaatcttcctgtccaaaattcccggactttaataccaggcgaagcgcctcattctccattggcaccattaccggcactccgggcgcaacgctggcgccaatcctgtaggaagagaatcccagccgttttgttaccgcacccgaggtttcccctcctgccaccaccaccctcctgattccatgggctactgcccgttccgccagctctgcggctgcctgttccagcatctcagccacacgctcctgtccatattgctgcacttctttcacgttccgggctgtatcggagctgtaaataagcactggtgttccccagttctctctcacaaacctccatgcgtcctccagagactccctgccctcaagcatggccatgggatccatcttatagctgaatccgccgtgggtttggaaatgggcaatctgttccagggtagccctggaacagcttcccgcaatcaggacggcggctccttctgcccgaatatcaagctccggcagtatatcctgacggcggctcagatgctttgccagcggctccagaatcccgctccctcctgtcagcagggccaaatccccgaacagctccacaatccgctccccatcctccatatcctggtaatccggtatcacatagtaatgctcctgtgtgtccgcctgatccgagagtatggcacggatttcatctgccggcctgtccatctgctccttccatagctccacgcaggaatacttgctctggggcttcatcagattcgcgattctggcgtcccacatgggggtcagaggatggttcttcatggggctctcatgcagaggcacaccgcccacatacaattcccccttcattaccacccgtccgttgaccggaagcgccgggcacaggaccgtataggacacgccgagaaattccatggccgcatcggcagcagggccgatattccccttcggagtagagtcaaaggtggaacagtatttcagataaaacctctcaaccccctgctcctttaaccaccccagagcccgcagggtatccgccactgcctccccggtatcctgggtcctggatttaagcgctattacaatggcctgtattccctccccaaccctgcttccttttgccggaattccgttaaagagctggaccgacatgcctccctttaccaaaaatgaagcggcgtcgctggcgcctgtaaaatcatcggctacacatccgaatattggcatagtttacctcctgttatcatgaaatgatatattatacaatatatattagcaaatttcatgccaatttgaatcacagccttcctgctttatcttccgctcatatatgttgcaaaaccgttgaccaaattgttgcattattgtagaatcgaaacagcaacaactgtataaccaaccataggaggcatgccatgatccatatattatttattgtaccataccctgaacttcgggaaaaggttgagtatgtcttagacaatcatcctgaaaacaaacgaatctgcgcagacatacaggtattgacagttgaccagatttccaagatcaatgcaggtagttacgatgctgtcatcgcccgcggtttcagcgcaaaacagctgaaaaccatgcatccccaaactcccgttatcgacctggcaatttccggttatgatatcatccgtactgtagctgaatgccgtaaagattttaactccacccggattgctatttgtggattttatggaaaaatatatgaagcctctgacatatgcaaactattaggatgccaggtggaaatttatccggccagcaatcacaaggacctggaagccaacataggtgaagccatcgtccatggctgtgacgcgctaatcggagggtactctgctgtagagctggccgaaagacatggcatcctatcccgcctcatacgtaccggagaggataccatccttcaggcaatcaatgaagccatacgtacggtggagcagatacagattgaacggattgttgctgagacctataagaccatcatatacgcctccaaggacggcattctgtatattgattcctctggaaccatacgggtacgcaaccgtgtggtcaaagccatgaacaacaatatcagcctgctgtcaaagtctcttcagaccacccttccctatctttacaaatcctttagtgaagttttaaagggtggacaggaaataagcggcagcattcttaccatccccaaaagcaacattactgtatccgcctcctttgtcccagtggtagtcaataacaacatttccggtgtcgtgattaccttatctgatattaccgagatacagaagctagagaatcaaatccgccgaagcctcagtgaaaaaggactccgggcaaaatatacctttgacgacattattcataagagtgctgtcatcgacgccaccattgacacggcgcgcagatatgccgcctcggattccaatgtcatcattgtaggagaaaccggaactggaaaggaattatttgcgcagagcatccacaatgccagttctcgtaaaaatggtcctttcgtcgccatcaactgtgccgccctcccggaaaatctgctggaaagcgagctttttggctatgtggaaggcgcctttaccggcagcgttaaaggcggtaaaatgggactctttgaacaggcgcacggaggaaccctgtttctggacgaaatcggggaaatatcactttccacccagaccaagttactgcgtgtcctccaggaacgtgaagtcagaagaattggtgataacaaggtcatctccatcaatgtccgcattatttccgccaccaataaaagcatcaatcagcttgccggtaaagaattgttccgccgcgatttgatgtaccgcctggatgtactgagaattttcctccctccccttcgccagagagaacgggacgctgagcttctgtttcttcatttgatgaggcagcggggacaggagaacggtattcctgttcctgaaatcaatatttcagccttatctgtccttaatgattatccatttaatggaaatatacgggaactgcgcaatattgtagagcgatctctggtaatctgctccggcaatacaatcaccagagatgatttgctaaaggcattatatccccaggatttagaagatacatctccgcttccttcctatactgcatctcaaacctccagcgaagaaagttccattttatgggcacttagagaatgcagcggcaaccagaccaaggcagccagacttctgggaatcaaccgttctacactatggagaaaaatgcagaaatataatataaaaatataattcaattcatgcaatggtgttgcacattttgttgtgatatcgttgcattttttgctgtaatggtgttgcaatcgcactccccctcacccctgatgtatttctcaatatatcgacctttttcttttgtcttttatgaagcttttattatttttaacgattattcatatacttggcataataattgctttagataaatgcatcgggcaataggaacacgccttactctggccctgccggggtggtcagtctccggggtaatggcgctctattccaaaatcaagaagaaggagaggtatattttatgaagatttgcgcgacaatgaaaaaatttcctgggggtatgatggtcattccgctattgattggctgtttagtcaacacgttcatcccacaggtactggagattggaggttttacaacaggtctttttaaaacaggaacctctacactggtaggcctgttcatcctgtgcagcggtgcaacaatcaacttcaaacaggctgcgcttccgctctacaagggagcagtactgaccattttaaaatatgccatcggtgtgttgcttggcctgggtcttaacaagctgttcggacccatgggaattttaggtcttactccattggcagttatcacagccgttactaactccaatggtgccatctatactgccctggcaaaagagtttggagacaatacagatgtaggagcaatcgctatcttgtccctaaacgacggtccatttcttaccatgattgcattaggcaccaccggccttgcggaaattccaattctgtctctggtagcagccatagttcccctgattatcggtatgattttaggcaatctggatgaagatttcaaggtgcttctatccaacggattagctatgctgctcccctttaacggctttgtgctgggagccaatacaagcctgtttaccattgcaaaagccggcgctggcggtattgtccttggacttataactgttttatttacgggtatacttacgtattacctttacagcctgattcgaaggaaaccagatcctatgggaatggccattggcaccactggaggtaatgccgtggctgtacctgcatccgttgccatggcagatccttccctggaaccagtggtgggcgtggctactgcacaggtagctggtgctgttgttatcacagccattctgactcctatcctgactgggttctttgccaaaagggctgccaaaaagcagcagaaataataatggacttacccgcatatcaagaaagtgaggaattttatggaacgttatatcattaaggcaaataaaatcatagcaggcgatcagctggaagttaaggaaaacagcgggcttcttattgaaaatggcaaaatccaaaaaatttacgataatatctcccaagttgaaatgccagagcaaataaatgtaattgactatggcgataaggtaataatccctggcatgattgactgtcacaaccatctggccttagacgccagacttgaaaatcacctggtcaaaatggaggactgcgaggcagagcagaccatacgcgccattaaaacgatgaaggacgacctggcagccggcgtaaccacctccagatgtctgggagacaggttttatattgatgtaacatgtaaaaaggcgcagaaagaaggaaggattgcaggaccgaagctggttgtcagcggcatcggcatgcgcagcagccatgggcatggatatgtaggaatgccccattgcggcgcggaagatttccgccggacttccagggaaaatattgcccgcggtgtcgattttctgaaggtatttatgacaaaggttatcaatgcaacacctttcatttatcactttttgaccttagaggagctgaaagtggtggtagaagaagcaaaaagcgttaatataaccacagcttgccattgttctggaggacagggattagacgactgcctgactgcaggcattgactgtctggaacatgtgtattatatcacccagccccaggtagaacgtgttaataaggaggaccgctgggtagtatatactcccagttacgccctgaatgaccagttgttatttaaattctccccccatgacagtgagggaagccttcgtgaaaaggaaattatctgtaaatgtttatccggcgccattgagggcggacttaagtttggcattggcactgatggtctgcatcaggggttggcccaggaggcctgctatatctctggtctgggtgctaaaaaccgggatgtactgtctggaatcacaatcaacgcagctcggatctgccgggtagacggaactaccggatctatcatggaaggaaaagcagctgatttggcaatcctggatggcaatccattagataatatcgaagctttaaaaaaggttacatctgtaattcaggacggaaccattattttctgaatctaagcagagcactactttgctgataaacttcagggccggcaccgggaaatacaatcgtgtatttaaccgtaccggccctgccgtctttatactttaattctccttataatccggccaaaaatgtctcagtttacacctataaaaaggatgctgctgcaaaccgaaattctatttgcagcagcatctcttattctatgtcacaacttcatgctctatcctgtttttcaatcaaagcttcaatccctcattatataatttatagggaaggcttcctgacaaatccaccacatcctttgttataggctgccctgcctttacatcttccagaagtgttgtaccatttaacagatagaacggagccacatttccagcatccttgagttcccacaattctggaaccagaccctcaatggaatgatgatgtccctggaccttaagtatggttcccttaggcatgtccttctgggccactccggccataacggaaacctggcggcattcagagtgagtacctagtcccaggatatctcctaacagaatggatataggcgtctcaagtcccatataatgataaggaagatagatacacgcatatttgccattacggcttaccacatgccctttacttgtaagcagttcccatacggtctcattctcgcatttgatgatgatgaactcaccccctgcaaaactggcctcatccggcgcacgcagattgcagaatacatctacaacaccagtcttcttaagtataccgccatcttcctccggaataaagatatctgccagttcgctgatttttgcaataggataattcagacgtctgtcagacggcaccagcccagttacattggatacaaggttcatttcacaaagatcagcggaaataaccgccatatatttttctaacagcttacggcgtccctccaatgtctcgcggccttcataatgccagacttccttcagacccggaatattctcgtgcggtttttcagggccttccatataggtgaattcgtcagtatccggatcccatacaaagtcatactcgctggctttaccggctgctatgatctctaatcccaatacttttccccaagagtaaaggtccaaaagatttcttggctgatccccgttaaccagagagtatacggtaccgtgtttttcagcaatatgattcaacataggaccacacacactgtcagtctcctttgaaaccatatatacattgattcccttctttaatgcatcctctgatacctctgaactcacagccgtgtttcccgtgcactcaactaatgccgtaatatcactttccagtaccagccgatagtcgtttacaatgagaaccgcatggctgggagcactctcaacctgctctttattcccgcatataataatatcctctttcttgtatccaagacctgtgagcacctctacacattcgtctgtatgccgcgaagaaatcagcctcagttccattaactcaacctttggaatttgtgctaacagcgtatagccatatccgcgggttgcacctataattcctacttttgacttttttccgccgttgttcttaaataaacttgtgtaatccatatcgcgcatttcctttctgttttatatttttcttctcacccttcctgtaacagccatccctgtcccattctatgtaaataataagttcagtccatgatgctacagataatgttatgggtatatttgctactaccaaactataacagcaaatatcatgccaaaaattaatcaaggaaaaagtgacaacatttttgccaaaaagctaagaatattagggtactgtcaaaaaaatggaatatgaaaatagaatgattcaattatacctcgtaacatgtatgcaacaaaggcagtcaacaatgcaacaatgttgcaactgatgccaaatgacctttgtctcagccatcttttatgaaacaaggctacagggcgtttttcgatattataataacagaaagacaggagatttttcacacctcctgccttcttcatatctctcattacacctgtctattgattccgattcactcccccgtaaccggcaatcttattcctgccatgctgtttggcacaatacagcgccttgtcggcacaatacagaacgagacagcagatgcaactccgtacaaaacccagcaattgtaaatatccgccagggccagtgagacaggcttggccttaaagctgcatatacagaatattataccggctagaaaattaaacaaatccagcttccatggacttgctatgaaaagaatggacatcacaatcataaacgagtaaaaactgatggccggcatatccagactataggaaactccggaaataatacagaaaatataaattttcatcatacaaaggaatacggcagcctctatgccctgctgctcttaaacagcaaccaccggtctgctgccatctccaacagcgtaaacacagccgtcccaacataaaccggctgcatgggagccacatatccggtaaagaaacccgaaacaaacacaaataccagaagcgacagcaccagcgcattaaaaatgtcaatatcccagtattataccgctcgatctctgatctgtatgtatcaaagtactctttattatatcctttcagaaaccattcccttataagacgaatcccgttcatacccataccccgcaccgcagcttttcatttgtctatcccaatcaaagccctcccagatgtcccgccaagtcgtatatcatctattatacaccccttgtatggtttggtgtaaataagctgccgcatttacagcttttactggctccgttttcctatatactgccggattccgacatatctcccatgctctgcgggaaagtgtttttcaccgcagggccgcccgtcagggtatatctcttccggtcatccttgagccggttctgcatcaatggttctacttcttctcaatcccatttgcctcaaatgcaatctgcagattggagcgcatcatgcggtccccctcatatcgcttccacatccactcatatgtatctgtcagctccgcacagggagtccgggacattgcctgcagtgcggcgtgggccagccagtaatcctccccctgcatccgttttgcaaaaaattccgcaaaatccagtttatccgggcattttcccatcacgtaaacagctgtacgcctgtcctcgctgctgttttccatattttctgcaaatcccttcaaatccgcagccttcctgttactgcagtctcccagaaaaaataagatacgggccttgtcctttatatcagggcggtacagcagacccagcattttcccgtaaaaccggtccttaaactggtccggcattctcctggcgcaggccacggctccctggggatggtttccaacgatagtttcttcaaacatcttcagccctttcattggcgccagtttaaaaagcagctctccctttgccccatctgtctcgggtctgtcccgctgtaacagaagctcaattgtttcaggctccgcctctgtaaacttatggaatccggccagaatcctaagcttgtcctctgtcagaacagctcccccatactcctttctgagttcctgctgggatttaaggctgatataaccataggatgtaaggttatgcccggccagaatttccaggaaatactgctcaaaccactccagaaatgtgagacccgttaaaaagggaccgtattccggctccatattccagtctatatatacaatttttcctctctcgctccccttccacatcagcagattatcgtaggtgcacccctgggtgcctatgaccaacaggccggagcagacctgcttcatccggacatcatattcattatcatcatttatatcctccatctcttccatggcccgcgcccagttaacaggactcatattccggtcaatgaacggaggcagggcttccttatccctggcatcatagaaccccagatattcgttgtaccggtccagattttccagggagtaaaggccataatacggtcctgcgccgccatttcccaccttggtgagaaaaaatacatattcatccggaagagtcaggtgccagcgcgcctcaaacctcctgacctcctcccgtgtcacggtgggattcagtttgtatccatgtttggacgaaccgaaaatttcatgcgtaccgtccttttttcctgcccgcttaactaaatcctttaggtatgcggcatgggcgtccgacaatggttcatatgtattagacggattgggcggattgggcggattgggcggattgggcggcctggattcctgctttcttctcaaatacgccgacaactttccccctatttttttgcctggcatacatctccccctgtctcatccctgctgctggcttgaacagcaagcaaatggtcgatattccggatgtcatgcttatccacttccctgagttcataccctgtatggaatactttctgaccctttgccgagatacacggtatggtcctgccctcaaaaaccgcgcttccgaaataatccgcctcaaattcgtaccatccgccttccaggtctgcctgctttgcagttccatcatcattgattacaaatggatggatgtccacataactcagctccgggtggtaaagttcaatccgcaccgggcgccagtctgtcacgatttcatagcctctgaaaaccaaggcgtcaagcaatacgtctgtgcaccgggcatcaaagttgatatccacatccctgtgctccctggtctgtttcccgaccagcacgtccacaccccagccgccgtccagccagtactgtatgccggatgcctccatcaggtccaataccttcaataaatccgtctttgttactgtctcttttttgaacataataccctcgtctttctccataaacatcttatatagcgtttcctgccactgcatcaagtttaccatattctcccgctcatatctacccggttccgtacctgaagcaaagaccctgaagcaaagacctgcagcaatgctctgaaacagaggactgatgcaaacccctgaaaaaagcaagccggaaggacccctcggacctcccggcttattccagatatcctggcattttttccccagcaatgacatgtatctcaatattcccggacattttcttaaggctcatgtcctctcttaaagtttctcaatcagctgttcaagctgcggaaccggctgcatacattcatgccccacacagagataaaataattcaccggtatcaggcaccggataatcttttgtatagggtataagacgctccatttcccgtgcattttcctctgtttttatcaccacagtcagtccttctgcggttacggccagattcgcaagctgagcagccagcttcctgcgcctttccgtgtcagagccagacgacagcgtacataccagctccttagcgggatacagcacatccatcatggttaaaagcccatagctgtgcccggaaggatatccgtccatagcgcctgccaggtaacagagctgtttttccagcaccttctgccatgtgacatctccggtaatccgggtcagccggtacagcacctgagctgccacggaattcccagacggcatggcaccgtcataggtttcctttgtcctcacaataagctgttccccgtccttggcatacagataaaatcccccgcgttcccggtcaaagaactgttccgtcattatctccgcccaggcagctgcccttttcaggtaatcaacccggaacgtcacccggtacagctccagcaacgcaagactataacaggcataatcatccagttttccttctcccgctgcatctccgtcacggtagcgcaccatcagacggccctccttgacaagatggctttttataaatgcatccgccctgacagccatatccacatactgctcttcccccagcactgctcctgccatcgcgcatgcacaaatcatccaactgttccaggaaaccagtatcttgtcgtccttgtgaagcctggcgcggtcaatccggtattgatacagtcttcggcactcctcattttctctgcctccaatggtgtcacaggagccatgacagatattgccgccatggtcaccattgccccacggttcctcacaaatctcctcgtaattatcattttccagcaggttgggtatgctcctgccttcaaaattaccatgccctgttattccatattgccggcaaaagtccctgcccgctttctctcccagtacctcccttatctcctcccgggtaaatacatagtattttccttccacaccatcgctgtccgcgtcctggccgcagtaaaagcctccctgggaatctgtaagctcccgcctgacatattccagaatcttttccgccacacacccatacatcttccgcccggtgcttccataggctttgatgtaagccatgacaagcaggctgttgtcgtagagcattttctcaaagtgtggcaccagccactgcccgtccgtggaatatctggaaaatccgcctccaatgtggtcaaagataccgcccctgtacatctgcaccagggttttctccgccatggccaatgcctcaggccgcttctcccttgcgccatactccatcagaaatatcaggttgtggggcgcgggaaacttgggcgcacttccaaaaccgccgtttttactgtcaaaacaatccgccaactgcctgaatgcctggtgcaccgccccaagctccggctcggcctgcctttctgtccgttcctggctttttaggtatttctctatctgacctgcctggtccagaagtttttcttttttcaccttccactgtcctgctgccgctgtcagcagttcttccagacccggcctgccataacgggccctgggaggaaaataggtaccggaaaaaaagggcctgcagtccggcgtcattatgatagtcagcggccatccgccctgtccgttcatggcctggcacactgacatatatacagaatccacatccggccgttcctcccggtccaccttaacacagacatattccctgttcaggatttccgcaatcacctcattttcaaatgattcccgttccatcacatggcaccaatgacatgtacttcatccgggacaggtcagctgtacccaatagataagaaaacaggcttattttccagccttgctttctcaaatgcctcctctccccacggaaaccactgcaccggattgtacgcatgctgcagcagatagggcgatttctcattgattaacctattgggtctgttgttttgattgttcacgatatcacccccttatgaacgaatatttgcccttctatgttccccaaggatacgcaaaagtatacccttctgccgtcagctactatgtctgtgatatgaaactatattatggcagaagtacgattctatttatagaatgtttcgccagcgtaacactgccggactgtgtctgcatcatgcaggcagccggtacaatggattcatccggcaatgtgttcatatcggaagttttctccgaagtaatggtggtaatttctgctttttccacggttttatttgaaatttcatatttaatttcaagaaccgcttcctggtcacaggaacggttcagcgcaaaaataaccgtatttccattttcgtcaaggcaggccgccgcatccacgtaggggacaccggaaagcggttctatatttccaatctgctcagacgtactgtaggttggcgagaaaacatctatgtctaaaacctcttttaaacggcttccggaatacatggacataacatggtacgttgcagtcccaaatgcatgaccgtccttgcttacaatgcatcctccgggccatccattcaccaaatctgacaaattacacatggcaagcttatctgtattccttaaaaacatattgagcatgccggcattgaaaatagcggcctctaatgtctgttcccggtaagagtcaataatggttcccacattatactctgtaaccgctgccatggcagccggattgccgcttttgcgtatggtctcgcatgagtcgtttaaaatcccttcgtactttttcacggaaccagctgttgcgtagtagatgtccctgctgtcatgctcgccctgtatctctttctgtgaatacatatggagacataccacatccattttgtctccgatgatttctgaaatcttccggttccattcctgggaaatgctgtctccgtccccgccgcataccatgaaagtgatggtcggatccttctccttcatggcatcataaaaggatagatacttgaccgcataaccggaggcatccagatggcctatttcccaatcaccaaaggtttcatttccgatatcccagtatttgatattccagggttcgggatgaccgtgggcagcccttaaccggccgtaaggcgtgtcggccaagccgttgcagtattccacccaatttgcggcttcctccgctgtcccgcttccaaagttgacgcaaatcataggttcacagccgattttacggcagaactccatatattcgtccataccaaaactgttatcctcgtaaccgccccaatgctcatttttacggaccggacgggtgtcccgctcaccgataccgtcctcccagtgatagcagtcggcaaaacagccgccgggaaaacgtatgacagcaggggaaatgttttttatccgttcaaatacttctctccatattccgtctaccgtatcagaaggcatgagagaacagccatctacccataatgtgcccgctgcttttaagcggatttccattgttcctgtgtaagtaactgcagcggatcgaaaatcaaaacagtattttttccattccccgtttacagaaatggttttgcttaaaaattcccgtccttctttatcgtaaatttcaatggaaacaggaacctcctgctcagacttcatccagacatatccttcataccttccattctggatacataaaccggtctgggcggttccggcatacccgtcataatggtttcggtctgttatcttaagagaacagccttccctggaaatagtgtggtcccagtcctgttcaaagtgaaaggcatcttttacacctgtccggtgccagaaatcaggaactccgtcttttacgtgctccgatatttcaaaactcctgttttttaacagctgcgcccacatgccttcgtcgatacagtctcgcatatattctatgaagtgtccgaaaatcagagggtttacaggccgtttatttccttctttgatagtaatttccgctttcatttgttttatcctttcatacctgtcattgcgattccctgtacaaactgcttctgcgcaataaagtaagcgattaagattggcagaagggacaggcacgcgcccgccataataataccgtattcgaccacatgggttcccatgaaggtggcaagaccagagggaagggttttcatattatcatccgttgtcaggagcagcggatacaataagtcgttccactgatacataaaatgaaatatgaacagggatacaatggccggtttgcacagcggaaccatgattttcctaaaaatcccgaattccgtgcagccgtcaatccgtccggcttcttccagccctttgggaagggagataaagaaggagcgcatcatgaaaataccaaaggcattggttgcccgcggaaggaccagtcccggatacgtattgataaggccaaatttaaaaatttcaatgtagagcggaaccatgattacctggaagggaatcatcatggttcccataaccataagaaacataatgttttttccggggaaattcattctggcaaaggcataacctgccatggtgtcaaacaccagcgatgtaacggtcactgctgtggagaaaataatggtattgcggtagtattttaaaaatggaacccgcttccagatattgatataggaatccagactgaaccttcccgaaaacagctttggcggataggatacaatctcggcttccggtttaaatgatgtgaccagcatccagataaacgggtacagaacaataaaggccagggctgcaagcaggatggttataatgatcttcccggcatttttccggtaaatgttatttgtccgcgtcatgtgtattcctcccgtcagcccaaatcttcttcaccttttgtcatatgtttaaaggtgaatactgaaataataaaggtgatgataaacagcgcaaccgcaatggtggacgcgtagcccatgttgaacgaatcaaaagccatgctgtatataagctgcaccagtgtctgtgtcttaaataaaggtccgcccttcgtcatgatgtatacctggtcgaatacctggaaggagcctatgatgcagttcacaaccgtaaaacttaacgtcggcatcagcatggggatggtgattcccctgaatttctggaatccggtggcgccgtcaatattggcggcctcataataggactcatcaattccatttaatcctgccagaaggatgaccatattaaaaccaaaatttttccatacgctgacaagaatgaccgtaggcatagcccatgtgggactgctcaaaacattgattgggttgaaaccaaggagttttgcccagtagcagaacattccgatgtccggattaaccagaaaactccataggatggaaacaatagtcatggaacagatggcggggataaaataaacagacttaaaaaatccgttcagccatccctttctttttaccgcaaccgccgtcacaagagccagcccgatttgcacgggaaccgtgaaggcggtgtaataaaccgtattaaaaagggcattccaaaactttttatcacccgccagctttgcgtaattacccagcttttgaaactggaaattctggaacatcatgtcgaatttgaaaaagctgaatataaaagcgataatcagcggaataaatacgaatacggtaaaaatggtcatggaggggagaacgaaataaaggccggctctttccctctttctttccagtgaagttttcatcatttacattctcctctacagggtcctattccagcatgctctgaatgatgtcatttgcttcatccagggattcttttacatctgcgttctgcagaagaattttttcaaatgcaggagtaatagcctgattctcaatatctgcaaagttagttaactgctgcaaatacatctggctctcatttgccggttttgcaaattctttgatatatggattttcgtttaaacgcgcatcgtccgcgatatcagttcttgcaggcggaaatcctgttcccaggcaccactcaacctgtgtgtcaacagaattccagtatttgaaaaagtcgtaaaccgcctctttattcttactggatgcagttaaaaacatgccaacaccgtttgcctgtgtaacctgctgctctggtccctttggcgcctgcgcaacaccaaaatcaatgcctgcgttcttaaatccggtggttgcccatggcccgcagaagtacatggccagcttctggctttcaaacagcttgtcaatttcacctccggttaaaacctccggaccaaatttcttgtcacggatattttccgcccacctggtgatggtttccacattttcaggactgttgaaaacagcttttccatcttttatgaaatctccgccatttccccacagcatgatacaccacattggggttgtctccttaaccgccatgtcaaaaccgtattttcctgttttctccacaatctgctctgcatactgctccagttcatcccaggttgcaggaggcgtttccgggtctaatccggcttctgtaaagattgttttattgtaatataaaagaagggttgcaaagttcatgggtacgccgtaataggtccccttccactttaaattgtccttcagcgcatcgggcaccactgattcatcaatgattccatctgcataagcatcgtcaacaggcgccagggcaccaggttccgcatacgtgccaaggcgctccggagcaaatgccaggatatcaggcccctcgcctaccggaagtaccgtggcgagcttctggtaaaggctgtcccagggcattatattcatctgtacttcaatgtttttatcattggtatcattgtacttttgaacaagtgcttccagggtgtccttatcagaacccgtaaaaccgttccaaaaggtaattactgtttttccgccctcagatccctctgtctgggctgcttcactttttgtttctgccgctccattggaaccggagcatccggttaaggcagctgatgccgccatgattcctgccagtccaagtgctaataatctctttctcattttcttcctccttgtataatggttcttattttttcggcatccactttgtcccgtctgttcatatccatgtgtccgttttgttcctgttctacatcggtcagctgtgtgtaacaatatccgctgataaaatccatactatatatcgcgtctgtcaggctattcagccgttccagataactgccttctgatgtttctgcgttcccatatccccacgccttttcatccttacagaaagcgattccgccaaattcacttaaaataataggctgtccctcataacggaagccgccggcaaaggcatagcgctccccgttaaaggattgggtattggacaggttttgttcccaatccgtccagtggctaagaagatcctccccatattccgcataatcatgaagtgttatgatatcggatttcgtgtgctcccatccgtcgttgctgatgacaggccgggtggcgtccagggatttcgtcagatagtaaatggcttccgtaaaaacctgctgttttttatcacataggattcttggaatcccccaggattcattaaatggaacccaggtaatgatggacggatggttataatgctgttttacaatgtcaacccactcttttgtcacacattcaatggccctgcggtcaaattcatagaacgaaggcgcctcgcaccagacagtaagaccatagacatcagcccagtagtagaagcgttcgtcttcaatcttttggtgtttcctcactccgttgtatccatattccagtatttttttaatatccagaatcagcgcctcttcatccggcggggtcagcagggacgattcccagtagccctggtccagcaccatctttaaataaaagtccatgttattaagttttactctgccggaatcagtggatattttccgtaaaccgaaataggaaccaacctcatcaattaccttcccatttttataaattctgatgcatacatcatagaggttaggtgatttaggacaccagtatcttactttccacttgatttcatcattaacaagagagatttttttggaaaacgcattttttatgactttatcttttccggaataaatggtaaaattctcaaatgtaataatggtttcaatttcaaatgaatcagagctgtccttccataaattcagttcataatcaacttccagggaattttcgtcatagagaggtgttaaataaagggctgttaaataactgctgtcagtttcttctgcccatacatccttccagattcccgttgtctgggtataccagcagtcataattttgtttaagccaccgctgttttcctctgggctgtacggttgaataggtatcttcaatgcggcagaccagctgattccccgtttttttcagtgcttcggtaatatcaaaggtgaatctggtatatccgccttcgtgaactcccatataaattccattgacccagagctccgtccggtaatccgatccttcaaagtttaaaaggattcttttcccttcgtgaagttcaaatgactggcttctggaataccagacaacattgcattcatcctgtaccccaattccgcccgccggactttcatacgaaaacggaacgataattttacggtcttcaaatccattctgccatccgcatttgattccctcctttcggggatcgaatctgaagttccattctccattcagggagaaaaatgattccctcacgaactgtggtctgggatatccttttttataaaattttgtcatggcaccctcacatctttacttgcagttttaatgtacctttaaaatagcacttattgtacaaaatgtcaatatattatgggtataataataaattatttgtgcatatttccaaaattaatgttttggtgtggtttgattaatacagtattactgtaacaaatggcagaattaacattctatctccttgttttttacttttacacccgatataataatacaataaagcattctgaatgggtatggctgaaaaaggtttgctatgcaggaagttgtatgtgtgtaaaagtcggctatgtgtaaaaattggctatgcataaaagtcagctgcggggggtatctatgaatcggcaatcagcaaatgaaaaagaaaagatagaccggcatattgtacttgacattgattcggaagagaattatgaattatttgaacggcttgggaaggcactttcatccagagtcagaatccggatgctggcgctgttaaaacataagtccatgaatatcgtggaactggcgcaggagcttacgattcctgtttcatcggctgcatttcatgtgaatatgctggaagaagccaatctgattaatacagagatgcttccgggcgtccggggttcccaaaaagtatgcagttccagggcagaggatgtgtttctgtctatcaacacttccccccaggaaaaggagcggcggtcattcagcgtggatatgcccattgggaattattacgatttcaggattcatccgacctgcggaatggtaaacgaggaaacctacattgattcctgcgatgatataaaatctttttactcacccggcagaagcgcggcacagttaatctggttccagaggggttttgtggaataccgcttcccgaaccatttcatcagcggcaaaaatccaaattatgtatcattcagcctggaaatctgctccgaggcacctggataccggaatgtgtggccctccgacattacattttccatcaatgacagagaacttcttacctatacctctcctggtgattttggaggaaggcacggaaaactgacaccgatctggtggacagacggaaacacacaattcggtcttttaaaaacaatcagcgtggatgggagcggaacttatttagacggagtgatgaaatcagaagaaatcaacattgatacccttgcgctttcagcccagccctatatctcttttaagatagaaattaaaaaggacgcaaaacatgtgggcggaatcaacattttcggaaaatcatatggagattatccacaaaatatagtgatgcatgtggagtattgaccggcgggggccggttagcagaataaaaggcggcgtgaaatcagacgtatattaaaaacgggccggcggtgaatagccggaatcggcaaggccggcagaagaaggccggattcggccttcctgacaaatgttccggtacccatacctatctgctcatactgcggatatcataaacaaactccttacggaaatagaacgcatggttcttatttgaaacataacggccatatacttcggaataaatagggtgatacggcattgaatccttgctccgcacctgtatatgctgtccgttggatgtatgtatacgcctatccgggcttgtctctatgtgcatcctcagctgcctgcaaatggagtagtaatctgaacgccaaatatcccgaagctgcgcataccggggcgaactgagatcgatatggatgctgggcaaaaacatccagtctttgggactgccgtctttacagaccggcacatataaaatattgctgattttttcgtacaaatgcgtttcctcaaaggggcgctcctgaataagttcatcgatcacactgctaatctgtgtaataaaaaccgtttcctttggattacccgcattatcacacttgttagttttcaattccccatcatcaaaatccagatttgtgctggacaaatgcattcccagggccagctccaaaagctggcctgttttccctttattaatgataatcatgttcatatcgttctggctgaacaattcctcaaatctgatacctgctaatttattaaaccggacacacgcttcttgaagtctcattttttctccttatttatggctggcatactgattcccaatctgtttctcccgcgaacgttgcccctgcgaacaccttcatagcctcctcttcctcaaactgcctggaatacagttcataataatatcccttttgctccagcagttccggatgactgccccgctctatgattttcccgtcctttacaaccaatatcaaatcagcctgacggattgtggataaacggtgtgcaatcacaaaggaagtatgtcccttcagcagatggttggtggcatcctgaatcagtttttccgtctgggtatcaatggaggaggtggcctcgtccagaacgaaaatggcaggattggccagaactgcccgcgcaaacgaaatcagctgcttctcgcctgtggacaacaggcctccgctttcacccacatcgctgtcataccccttttccattttcgccacaaccatatccgcagacacattcctggccgcctcttcaatctcttcatccaatgcatccaggcggccataccttatattttcccgcacagttcccgaaaacaggtgcggattttgcagcacataaccaatctggctgtgaagccacaactgcgaccgttcccggtaatccacgccgtcaatcaatatccttccctttgtcggttcaaagaaacgccccaccaggttcacaagggtagactttcccgcccctgtctcacccacaatggcaacattcatgccggcaggcacatgaaggttaaaatgttccagcacatattccttcccgtccgggtacataaaggaaacatcctcaaacacaatgtctccctggattttttcccaattacacttattgggtgaaaatacgtctccgtacttcctgagcacctcggtgctgtccaccacattgggcttttgttccagcagatccatcacccgctcaatatttgcctgacaggaaatcaactccgccagcagcctggcaagctgctgtatgggttcaaatataacaaccgcatacgagataaatacagacagcgtccctagtttaatgatattttcctggaccatatagccgccctttgccaacaccacagctgaggccacagagctgaaaaacaaaatagccggaatatagaccgcattcagcttagccgaacggatcgccgcctgatgcatatccgatgtcttttcaaagaagcgtttttcattgtccgattcaatgaccatactctttgacgtcttaaccccggtaatgccttcattgtaagcgctggtaatctgggaattaatccgcctcaccttccggttccatttcagaatccgattctggaaatacacggtcaaaagggcaatacacggaacaatcatggtgatgataaatgccagctgcgcgttcagcataaacataatcacaaacacactgaccacataaatcagggcccagaacatatccaccaggccccaggctatcatccccgcaatcctcagagtatcactcatcacccgggcgtggatatatcccaccggagtcgtattatagtaggaaaacgacaaggtctgcaaatgtttaaactgcgctctctttaaatcctttcccacattcatctctatggatgtagccgcgtgaaccgacacatacacacagacagtctgggccacaataacagaaatataaaccagggtaaatactccaagcccatccaaacggtccgggataatgaatgtatcaatggcatagctctggaacagaggcacaaggatatccactcccgcaagcagaatattaagacccagcgtaattgcgaaaaacttcttatacggcttgaaaaacggaaacagcttcatccatatgcggaagctgaagggattgttatactcctgttcttcatatgctgccattgattatccccccatccatcttatcctctttcttcttatcctctttactcttcttatcctttttattctttttattctttttatccttttcatcctgtcccatcaggtctctgtcatcacggctcatctgtatttcataaatcctgcgatagattccatttctccgtatcagttccccgtgggttccgcgttcttctatttttccctgattcagtaccaggatttcatccgcgcccataagagatgtcactctgtgggatatcagaataaccgtagcctccctcatatgttccttcagcgcgcagcggatgcggtaatctgtctgggaatccactgctgataaggaatcgtcaaacaccataatgggagctttccgaagcagcattctggcaatagcaatcctctgcttctgccctcccgacaaagtaactccccgttcccctacaagagtgtcatatccatccggaaaactcataatggcgtcgtcaatacacgcaatctgagccgcgtaccgaatctcctccagagacgcgcctggtacggaagccgctatattttcccggattgtcctggaatacaaaaagggttcctgcaataccattcctatatttctcctgagctcctcaatggggatgtccttaacagctctgccgccaatacagatgcttcccctgttttcctccagctcatagagccgtgaaagaagctggattaccgtagacttcccgctgcccgttccgcccagaatcccaaaggtgctgccttccggaactgtaaatgaaatatcccggagcacatcctttccttcctcatatccgaaggatacatgctggaaggagatgtcatactttccgctggaatgttcgcgttccttccctcctttttcatctgtctttccataggcttcttcctgggagcgtatgatataatccacacgttcaaacgaaacgccagccttgctcatatcagagagaatacgcccaaggccgcggattggccacaccagcgttgaattgtaagccgcaaacgccacaaattcaccaaccgatatggaaccattcacagcttccaccactccgaaaataataaccgcaatcacctgcagccctgttatcagatccccaatcccccaatacagtcctgataacgtccccagacgaatccacagcttggcaaaggcattattcttcttgtcaaaccgctccatctcaaattgttcccgtccgaatgcccgcaccacgcgcactcctgttgcattctcctgcacgaccgtggaaagttctccctctgcctcgtccgcagtggtaaaccgcttggctatcagccggtaaaacacagtggagtacaccacaacaaccggcacgaacaggagaacgatgcaggaaagcttcacattcatggaaaacatcatgacaaaagacgtaagcacaagaaaggccgtgcggaacacctccagaagctgggtaaccacaaatccgcgtatcacctccacatcagaagtacaccgctggataatatcccctgtctggttcctgtcatgccatctcatgggaagcttctgcacatggataaataatgtatcccgcaaatttttagcaaaattctcccctgccctggctgtattggtacggctgatgtaggtaaaaataccggaggcgattgccaccgccacaatcatcagcgccagaacccagaggtggctggacaggtaacttccgctggttccgctgcttcccatggttccgctgcttccactgagcacctcatcaatgctgaagcgaaaaatctgcggtgtcagggcatttaatatggttgataccagggatgcggctacggccgcggcaaaatagagtttggatccctggaggaatctgaatatcagatggagttttctgtgtttggggattgtgtttttttgtatgtttttcatatatttacccttttatattgcttatgattaaatgcttgatgctgtccggttgataaatactgtctatgtaaatgatgtaccagtaaatccggggcctaaattgataaaaaccaagcgtcatcaattacatagtcattgaccggtgcaactcctaactgtaattctctcaacttttctaccaattcatccccatcaactaaatcaatcggagtagctccaggtctattggcctcttcaattgcaggcgcagaaaacttaccggttgtaataaacaggcctttatcagcccttccctgcatagctcctctaaaatcccgaatttcaccagcagacacacttcctgtatatcttttacactgaaaaagcatatggaagctaattattccattcaattttattattcccattccatcaattccaccatccccagtctttcccgtaacttttacttgtgtaaatccagactctcttaataatcgttgtgttaaacgttcaaatgcatccggttttaaattttttaatacatttttgagtttttcgcgccatgtctggatttcatctggtgtatcaacgccgtcattttctaaattatgatcctcaagacttatctctttcgtatctttcatctttaataaggtcatttcacgaacctttttaacaatttcatccgaatttatttcctgtaattcacggcctaccgtagttagcgcccatactccacgtgcagaattctctaaaattccaacctttttcatatatgttcttgtccacgccaacctatattcgacttctgatttactggtatcaccatgcataattgttaatacttctggagataaacctaatatttcaatcgttttatcatcaatctcttgtatcgttcccgacccccctaattcttttatggcctgaaacaattcctgcatcatttcatgatatgccggtacttcctctgtttttctcatatagctcatcccctctttcttacgtaatatctcaaaacccttcttacataattatccaacccttttctactaggcagatataatccatatttagatactaacgaaattcctttttgcgaatcgctcgaaatgattgttttcctaaaaattataacatgatttttcagaactggcgactctcgttttattcgaggattaatttcgagacgcgtcctttgtttgttttctacttccaacaataaaattttcgatatcataagcatcaaaaactttattctatacagtagccatggctctcatcatgctcctgttcctctatctcttgccgactgccatcggatttctctagcggcaattcagcaaaaaacggggatatgccacctcatttttcaatctcttttcttcataaaaaccgccgctcttcacaagcgacggctaccgtattaataaatagtgtttataaatattcttttagtgtaaatatagttgtgttcgttaaaatattgacatgaactcatcaggtgttgatatgcttcatcttcattttcgcacaattcttgatgtttttccattagcattttttgttctatacatatctcgttaaagtatgtttgcattttctttattttacactgtacttccatttgtcttttctgacacaattctacacaaacctcgtattgtagtactcgggcaataataatgacaaaaaacatagctttccttagtggaactattcgtcagtctcctactaattattttctccgtccatcttatctaattccccaatactctctaaaaaatgacattccacaggagacaatatatattcctgatttcttttatacctttcatactccgaatgcgccttctctaaggcctgctgatgtgttactgtcccctttgttgttaatatatcacgtctggtcatcctgagataatcatcaatcgtctccagccagtctttcatatacattggttcctgatttaaagcatgtacctctgcaatatccaaatatgccgttacaattttattgagtgcatccaactctttttcatcaagataatttttcgccacttctacatccgagagttttatacgtttgccactccatgtagtcagtcccatattatctttatctgcatctgccctttggtaaatcacctctgccgctgtatgcttatgtgctgcccaatgcatcttgttttgaacctgtttaaaaaactgtacggaactctccgccttcggattgtagtcaatactggtcgcatagatttccagcacttttctccaaaacactttttctgaagaccttatatcccggatacgcgccagcaactcatcaaaataatttcctccaccaagattctttaatcgttcatcatccagcgcaaatcctttaatcatatattctttcaggatatttgtagcccaaatcctaaattgtgttcctcgcaaagatttcacgcgatagccaacagagataataacgtcaagattataaaaatccacatgatatctttttccgtcggaaccagttgttgcaaaatttgcaacaactgaatttcggcttaactcgccttctaaaaaaatattttttatatgtctggatatcgtggatttatttctttgaaatagatctgctatctgatctaacgataaccaaacagtatcgttatcaaacgtaacttcaactttggtaactccatcctctgttgtgtacatcaatatattagatttttccactttctcttctcccgccaaaaaatctccgaaaaaaattcgatgattatactattccttaagtttccatatccatttcactatattttaccatactcccctcaccattactatctgaaagattccttcatttccgtttattttcccctctgcaacctaacattctcatttacctattattcaaactcacatatctgatatccctctttttcagcataacaaattatcaaccgcttctcataaacatctattctcttcactctatcctttacgacattttcatcatattccccattacatacaacttttcccaatatctctcttacatcttgatcgttcaaggtaggtgaattttcacactctgcctttcctttttccatccttgtcccacatctccacacaatcttcccacgctccgttctacgcctgaatcctccgccacaatacccacataccaataaattaccaagcgagtatttacttctatatcggttaccactactaatctgattgccatcagatgttctgagcagtctggctctattaagcatttcctcctgcaccttatcaaatatctccggagaaataatagccggatgacttcctttcacataatatctggtacgctgtccaatatttttctttcgtataccattcaaataatctttcgtaaatgttttctgaagcatcatgtctcccttatatttctcattttttagcatttgctggattacatttgcactccatacctttttgcctgttaccgtttttataccactctcctccaaatatttcttaatctgcaaaaacgtatagccctttaaatataattcaaaaatcaatcgcactatcttggcctgctccggaacaattaccaattccccttccacacaccgataccccataaaatgtttgtagctgctaaatagcccttcctcaagttttctttgaatcccccactgaatattttcgctcaggtttctgctttcttcttgtcccattgctcctgacaaggttattgccgcttctgcatccggatcaaatgaattcacattttcaatttcaaaatacatttgtatacccctttcttttaaatatctcataatctgcaatagttctaccgtattcctagatactcgttttgctgatttagtgattatgtaatcgattttcccctctgtagcactttctaacatatgttttaatccgttacgaccctttttccttaatccacttcttccacaatcccaaaatactcctgaaaatacccaacctggatgatctgatatctgttctgtatatgccataatttgatgagccaaactggctaactgcgtctctttcttagtgctgacgcggcaatatgccgctacacgcagcggttccatattctcttttttcacaggcatataatatatatttttcaaaacacatcacctcgtttcatcaataaggaaaaggcgcgaaagccaaaagccttcacgcctcaccacacggcaactatccaatctcacctaatcatcatttaacactcttttgcaacaggacaatactttccgtatgcaccgtttgttaacacataaaaacatactaacatatttttgcacatagtaccataaaacaacctttatttaaagggaataaagagaaatactttcacatattggcacacacaaacctatactatcatttaccaaaacttgtacagggtaggcaaattgtagtcactgcctaccaaataggcgggcccggtcacatccggttcccgcctttatcatatcattattcataattcttcatatttacctgttatattttagttgtggaacctgtgcttgattctgtaatattgcaactgtcagtggcgcatgtttctcacaaacgagactggcaggtaactgtcggtctctcctcttttgtataaaaacggcggagccgatttattcgactctgccgtttaactgattaactttcatcttgttgttccccaagcatcaaaacctttgctaaaattgtcagtgctctctcttcatcaatataacttacatctttcatactcaattgacttaataccatttctatcgcagcaaatgtgtcttcagccgctttcaacgttctatattgaacatgcggatctacgatttcaatcaccccaccccctatagcttatattagcatgtcgtagggaaaatgtcgatagagtactgctaatattctgttatgaaactgttaagatttaccaattttatgaatatcttttctacattaatttaattgaacattatatacacaaaaacaatcaaaatttattccactaaactcgaccattgtagcattctagtaagcttaataaatctaccactcgaacacgtaccgtcgatttgccatgtcgtattcttctgcaatccggagcacacccctagcatctgtaatcatgcacttgccctcgttgctgcccttgactgggcaaagtaaaaatgcctcgccagcggggtccacctggtagccggtcatcatgtagccctcgctgtcaaacaggtaccagccgcaggtaccgtccgtggcctccctgagccagtaccagccattggccgcatagctgccgtctgtaaactgataccaccagcgctggccgtctgtggccggctggaaaccctgggtgtatgtcactgggaccggggtatagtcgatgtcgcagagcttgaggaccttctgccagggtgtggcggtcactttgctctcttttgtgccataatcaatgcccttggcctctatgcaccagccatccccgatatacaccccgatgtgtcccggcttccacagtgcccaaccgaccatggtctcgttcagatggtcgatacccacgcgctccatggctgtgtcatggtagttgtaactgccacggatgcgcccggtgtaccagctgatgagaccgctgcagtccgtgcagcgctggcctatgtacttggctgccttggccttgtaggtggatgtgtatgtacctgggttctcccgggccaggcggtccaggatggcctgcgtcagtatctcgcccttggcgccgtagacgtaaggggtgcccagcttgtccttgcagtgccgtattaatcctgctgctgttttactcatagtgttttcctccatcaaaaaaataaggcccaggggcatccctgagccatgaaaagttgtaatgtcacaagttgcgatatcgcaacgcccgcttaaccccgcggcgggaaatattggaccacctcatctcaggcatccatttttgtatccagctctggcaggcctgctacagatgtagccatggacagaatgccggccagtacagaggcggatgcaaccataggccagttaacatcacccatcacagcagccgttccagtcatggctacaaatgtctgagctattgtttttactgctcttcttccagctgccctaaaccatttttttgcgttctcactcattctaaaatcctcctttattgattaaatataaaataccagctgccaccgcggttccgatggagctggtaagagatgtgaaaaaagttttctttgcactggaccactgtttcgccggttcctgctccagtacctccaccttttcctttatttcatttacgctatcactagtatgtttcatttctccagtcaattccaccatagtctttgacatgatatgtatttcatttatgactggtttcaaatcctcaatctgatgtgtattgcttttcgaccgttcctctactttggtcagacgctccacaaattccgtctcaatcacatatagcaccatcccttctataacaatctgtaatgtggccactcctccccaaaccaccagtacctcagccagtcatccagcacaattccggccaggctcaccggcagccacaacatgaagaactgcggacatatctgccccaggatattacccggcttattactgtaatcccataccccccagcccaaccacaggttaaccacacatccggtcaaaaactcaagtaccgttatcagacaggcgccgactagaatctgccgccacaaaggcatttcccaggacaggacctcattgataagcccaaggccaataaaacacagaccacccagaacaaacatggtccagtggctccatcctctccaggccagttccagcagtatgtacagcaatcctcctacatcaaacagggtcaggtacttattcagcaatcggtgtcccatattcacccactccaatctctgtggctatctgtacaagatatgcattaagaacctcagacctgtactgttttggcacgtccgcaccataaaatatttcctggacctcctctgtggtctggcaaccggcaatccacatgttaagagcgttacagtacgtggtatgataggacacatgccgcatggccgcctgtatgatagcctgcatgtctattgccgtgtaataccgacatgactgcccatcggcgtggtactccaactgtgctgcaccgacacttatctgacttagcttgccaaataaattcagctggtcgtgctccgtcaggctgtaatgttctgtggtcccatcagacagtgtgacattaattccggcatagataatctgctcacaggctgcggatacttcggccttcttaccgacgcgcacttcttccagcgtggggacgtaaggttctggcggttccgctggctccggaggggacggaggtgtgtatacgcttccgtcgttggatagccataccctacttccttcttgcttccacatcgtctcatagccgtacagggtggtggcctctgtgccatcatcagtatagattgtaatatctccccatatggccgggattgcgtcggtaaagacgatttccaggacgttggccgattctggccggatactgctgatttcataccgtcgtttttcctttccaattctaattttttccatggataataccttctttctttgatttatgtatttttatgtatataaaaagaccctttcgggccttgaattttcttatttagtgtgtgttatactaagattatttatgttgatacatcgtcggtccccataacggcatctgccgggcaaagctggtttgctgatattccctttacaaaacaggacgggtacattccaatctcagcaactataaattgtacggccgggaattcccaggcgtacataatcggaattcaccaactgacgaatggttctgtccgggtggcatttcaaaactacagcggctccccccaaaccattaatgtatctgcaaaagtagttttagtaaatcagccttaagtttaatcaaatcttgtccaacctgaaagcgcacagacagcagcgccatcaaccagtatgtagataaaacggtttccgtaattatcaacgccccattttaaactgattgtattactatcatattttccacccatatcatactgtccacgatatatgtttgccttttgagataaaccggagtctatcttagtattgcgcccattagtatgattattcaggcaaaattcagttttatacattttccgtagtgtgttcaatactaagagcgagtggaagctgctgggaacgataaaaggacggcaggcgatagagctaccgcagcagggaacattttcagagcttatagccattgtttcatatacttattcggttacacggaactattttattcctatacctgctatttcattgccgacaaatgagcaaagggccaatataggaacgggacttggtggtagtttaggagagaatgtctctgtgagtttggcaatatcagcaacatatattaggcttgtgacatatgtctttgacggtgtagctcatgagaacgattctacactgactgtatattacaagtgattatttcaagtaggggaccagtctggaggacgtagtgaaaaaggcattgttggatgctcccaggactacaatatctccatttttaactggtgcagcaaatacattagcacctgtggatgaggaggaggacgatgcgccgttgtctctccaatttgcaagcgtaaccccattaacagaggcagatacacttccaacgcttgatatgctggatgctaccaaagttaaaataccatcaaacggaaccgtatatgaggtattacttatcacattacttttaaatatgctcacggcatttgcatagtctggatgccctgcgctcttagtataatgccccgaaggcaaaaaaaacaggctgcataataataccatgcaattgtaactgtgctcaaccgctatacaagggtacaataaataaacctccctgcaggcaggctttcaaaagttctatcttgtattattttctatccagccgcatacatatcgtactcgtacttaatctttccaacaccatttttggcataaatccgtgtagtttcaacactggcatgccccattaaatcacaaagggttggtaatggcatacccttattcaacgcgcgtgtagcaaatgtatgacgaagcagatgcggaaagacacgctttcccagcccggcctggtttgcaattctacggatgatattttccagtgcattcttcttcagaccttggtgaggcgccctgctggaaagtataacagcccccgatctacggccatctaaatacctttccagatactccatggctctgtctccgaagaatacaatacgctccttctggccttttcccagtactttcacgcatccaacctgcatatcaatgtcctctacacgcatccctactacctcggaaacacgacatccagttgccagaaacagctccaacactgcattatcacggacgtttcccccacaggcaatcctcaacttctcaacctccctgctggttaaagcctcccggatttctgccacatacttaatggggtcaactgttgccatgggattttttctgatatacccacggtcatgcagaaacgcaaagaaagagcttgcgatacgtcttttatggtcctttgtgctagtacttatttgccgcacctgctcataatagttcaggcactcaaccacatcttcccctgttatctcctgtacaggctttcccacatataccagcaggtcagttagaaaccgttggtattggttaactgtactggctgaatagttctcaaacctcatttttccaatgaaaatgtccagctccgggaagctgaccacattggtactcagccctgtctccctcttggccacctcatagtttcggagcaccgatgataatgccccatcaatcacctgcagcgcaggccggtccagctcattggatagcctggccatcagttcatctttcaatcttatttcatccattctaaaacccccttctcgttatatttggatacttccattgtacgaaaaggaggcctaatcttccagcctgctttactgtgcgcaatactaagattacagattttgatagccgaatacatattgacgataccactaccattgcaaatcttagcgctcagataaagacaggattccagtgtgtctatctgaaaagcgctaatttaaagcccaactatgggcatggtgtgattttagagctaaataatgcatcgggactatatgcgataagaataatatcctgggatgatgatacacccaatataggaatgtattatggcattaaactgagtccctccacgttaatcaaggatgtaagttactttagcctacaagtcaatcgttagtttatccttggtatttggtcagatatgcaattttcccaactattgaaaccaaatgtttttccaaacaccaccacttttaattttgtaataaggtttttcggtactatctgacctataggcaacgattcgtatagtattgtcagatattttcagcacaagaccaatgtacacattaatcgttgggagataagggctagacggtcctgcagaaaaattatacattccatccataagagcatcgcaagtggctgttatatcttcctgctcaatgttgatattttttgctttattgaacagtacctcataattagtattgagcacagtataaaggtccatcagtaccttgccctgagcagccgacagcggcaatttagcattgttagtcacacagttattcactatctgtccaatcaagcagacgccggtcatccaattctttgtgtcctcaaagaatttcttaaccttacccagaaatgtctttgtacattcgccggctaccggaaccgggaactcggttgtgatagtctccaaggtttttacggtcatctcggaaacatcacctccggatgcatctgcctttccgttccaggtactacgttctgcatccgtaatcatccggtgtttactgtcctgcgtgaccttgttggccgcaacagctgttatatcatcatccccaaccttatccttaaatgccagcgattttaggttggagaccagcttctcctgtaattccttcacacattcatatgtccggttgaagaaccagttgaagtatgcggccggaggtttgtaacccgccaggaacccgcctttttttaattctgcatccggctccgcgcctaaattatcccattccggcgccttgttatcaaatttaatcgccatcttttcctccttcttctatattggcaacactggaatcttgtcatcgtctcccagatataatcccagataccccccaatggtctgcccgatatttccaaatccagcctgctcgtcatacacatcagccgtatccgcaaattcaaatgtcccttcaaagttatctgcagacaaggttacacagacagggagcagtgactctatcatggccacggcctggcggctggaaaatccggcattgattaggacatatactggaaattttgtaagcctgacgacacaaggacgctccccttccacgacctccaggtcatccagggtaatatcacccgcctggctgccaaacatcaatatcagcgtggacatgactgaattataatcaccctggaccacattccggccaatcctcgccagtatcatgtacctgtactgttcatcattcaacaggccacggcgctgccccagcatatccccatataagtccagagtatttccattcgcctgattcaggtccagagaatccagcacggtctttatgtccaatcttaattcctctgttgccagcctttccaattccaacagcttatggttattactgtcctcatccttccggtaacaatccggtagacgttcaaccagtctcatccggtcacctcgatttctatgtcttcctcctcagaccttgcaacctcataatccccaatgacgatatctctggccgcaaaatccccattatcaattgatatcagcagttcctgtacattaacgacaccatggactttatgtatgtaaccatataggctggtcagatacacgcaatcaccattggccagattattaatgtactccagtaaactggctttaatctgaccgacaccggtattctcaaagaattgattcgtcagtatcctggcctgtatatggattatccgcttaatagttcgcgagaatctgacggtatgaggcttattcccttcatccagtacctctacctccacctgtccgacactcttaatccctaaaggcttttttgagaagattgcttccgcaatcagctggtcctgactctctggcgccagtacataacactcaaagctatggggcggacgcccatccaccgtttcctccgtatcgttttccacaaccgccactccgtccaccagtgctaccctggacaacgccccacgcaaggcgtccactgaggcactgcctgcacctgccacggagaggccaaaccgaatccggagtgatgtgtcgtcctcacgttcctggccataggtatcaatccccacaaactctacccgttccaagtccgggtccggattctcaatcatgagtgctgtcccaggaataagattccccgcgtctccggtttctgcacaaacagcaagacactccacggttccgtccgtacccacaacgtaatccatatcaacgtaaaatacatggccacccccggatatggcaaaggccgccgggaccacggccccaacagttccataaatcatcacctttatgcgtgcagctgttgccgggtcacgcaccaccccagcaaatgtacacaggcggtccaggctctggcccctggcgctgtttgggaaccgggagtaatagatgtcctccagaagctcataacattccgccaggtcagatacattaatccgaatgaatttccctagaatggactggccgcttgtgtcaatatcctcgccaaacagcttctttgcccttgcaacttgggccgccagaaggtcatcatacgtgggcctctggaatcctttttctgtcaaaaccatatcatacctccacttctgctgtcgcagccgcatccgcactggagacggagaacataatcctcagcacccttccctcggtcataatgtcgcagcgcgtcatatgcagtgagggatccacctgtgagaccacattgcgcacataatctcgtaccatcgcaaggttgggattctttctcaataccttctgcaccggtataccctctttggggtccagccaccactccccccggttggtactaaggacctgacgtatcttctgtatcagcaggtccgtgccatagaccagcttgatatcattcttctccatgaccacatcgccatggatatccaccgaaaaccctttcatacatgcctcctatagtattccaaccacaacagcaccggccagagagtggtgaccggctaccggtgttgcaaatgagcccgtcctggtctcagaaatatcccggtccgcgcagacacagaataccgtgtcccctggggcgggcccgaccacatcccatacctcaaccgtatgcttatgggatggttcaccgccggttgatgtagaccgtgttgtcttcacaaaccgccttgctccctggatgaccggacagtttggtatcactgcctgtttctggggctgtccgccagctgccttgaccatattaaggggctggatggtggccaggttcccgctgatgctgataaccttcccgcagaatcccgtatgtatctccaacatggcctgctcaatcatgttgttaaatacgattcctttcattacatcaccccactttcgcccctaatttgcgcagcatctccaggttctgtgccgcagtcccggcatacccctgtattcccagctgctccgccaggaccttcctgtatgcgtaggagctatccgctccaatggatttcaggccgtcaacaatggatacgccactgtatccagacagattcgggagaccggagctgcctgcttctgaagctgcctcgccagttggtaccggcggacattcaatcgctttcaccttcgtaacaaaattcgtaccgtcataggcatggctcccttcacgcacccggtatactccggatacattcctggactgtaggttaattaggctggcggttgttatcctgtgctgcaggagcatcgtcatttcatatccatggaccgtgtccttaaaatcctcagcggtctgttcctcctcaaactcggacaactccagaagccctgtatctgacgacaatgtgaaatccaagccatcaccatccaggatgtgcctgacatatatttgtcccttacagatatacgccgacacgccacagaccgcggcatacctccggatgttctccatcagaccaccaccaactgttgccttatccttatagacatagtcccgtttaggggcgaacaccgccaccggcatccctgtcattcctaccaggtcttgcaggatacggctggccggggttcctccagcgtatgatatacttttcaaatcccgttcttccagttccggcttatctattgcatgtatctcagtcacccggtcttctccggtatagtaggaccggggttttgatatgataccactaaatataactccagtgtcatttccataaccggctgtcaccgttatgggatttcccttctttatattctggatggtaagatccgacaggttgtagacaataatctctgcctcatctgcctccgtattatcatcaaatggtatgtcaaactcacaatccagttcattaagattaattgttacatttccggtctgtataatcacggtatggccatacagtccgctggtatctgcctgttccgtatccaggacgatttctccctccagccggttcatggcttcaattactcgcgagtcaggcccgcccagttgaccatccactacaaaactacgcttcattatttcacttcccattatcaattgttaagaataccgtctgcccgaaattttcccagtttacctcgcgttcctggccggattcatccagcggaacaatatccactgccggaaacgcgccgctctcgtagacgtcccggaacaatggcaccccatatatgaccggctcggcatcacacaaccgtttcccatcacggtaaagcgtgacgctgaaaaggtccgcctgctgattataggcgaacctcatgttaaatttatctttccccagtgcaatattaaagccataggggattaagtccttctttacgatgattctatccctcatgccggcctccttatggtatcaccagaacctgccccacccttatcttattagggtcagacagtttgtcccggttcgcgttgaatatctgcgggaatagggacgccttcccataataggctttggccagaccggacaaggtatccccgctcttcaccgtatgcgtcctgacaggcggttcctgggccgccggtgccggcgcctcttcaatctgttgggtggcactgttcccgcttcccgctgtatatgggcttgacgctatgcggatttcctttaactcagccgagaaattacatcctccatggatggccccgtcatgggttgtcatgaacttagtcagcagtgcactcgacaagacattgacaccggtatactctaccagtttcgcccctttctgtatctgctccagctgcgcgatatcatcctcataatcatcccctaccatctcccctgtcaggctgaggaccagcggggaccgcctggcatggtctgtcaggtcaatcccttcctcaaccggatggctgctggccgtcacttctctggaaatatcttctgttttcacaaatacataggtatcatttatcaatgccattctacacctcctgcagtcgtggattcgttctgcccatcccctccatagcttccttcatggcctccttcacccagcgctttaccttgcgctcattgctgtcgcttgcactggcaccgttcagcgtcagattaaacaccggattccaggtatttacctgactggtttggctggtaccgctggacgatgtactctccgggctgtattggctccgcataggagacatgttgactgccgtccggtccgcaatcccctgggctgtcctggtaatctttccagacaggttctccatgccctttatcagtcccagcccggtgttttcaccgctctcctccatgactctggatgggctatggatatccagcgaaccgttgacggcccccttaaggtccgttccgatacctctggcggtactgatgactgtactgcgcatactcttaagaccgttgtttagcccgcgcatgatgtttatgccggattgatacagatcggtcctctcaatctcgtctttaaagtcattaccaaattttccggcatctgttactatgccgctaaatccggcctgcaccgcggtatccagctgtgtcatctgtgtgtccgctgttaggttcatatcggtcatggttccatcaaaagacatactcaggccgtccagtatcggctgcgttccctctgctgtgccggccatcgcctcattcatcgcatccagcgctgcggtccccagaccggctgcggatacttctgccaacgctgcgccgttgtctatcccggaggccacggcagccggcatctgcatcccgtaattattcagcaggtccgtatccggtttcagattttccgtcgcatccgccgtggtctggtctgcggcggcggttaattggctggtgctttcatccaatccggccgctacgccgtcaccgacctcttttccggcatctttgcctttgctgaacaaacctttgattccctggaccaggccattcccaatgccctttatgatgtccaggccgagtttcagccagtccacactcatcagtgtggtgattatggcgcttacgattgtcggtattgtctggataagctgtggtattgctgctattaatccctgcgccaacatgatgaccaactgtattccggtcacaagtatggtcggtgcagctgcaatgagtccgttcagcagctgcataataatgctgattccggactgtatgattgacggcgcatttgccagcagtcccgcgcacaggttctgaatggccgtaagccctgcattcaggatattcggcatctgctggtccagcccctgaagtatggatcccagcatcaggacgccagctgtaagcagctgaggcgccatctgcacaagcccggtaagcagggtggtgacacctgcaatcacactttgtgatatctgtttccggttctggataataccagaaatcagggattgaatgattgacatgccgccctggaccagttgcggcagatatccagtcaacgtcaccagtacattggtcagcgtcgttcctatctgttctgacagcccatccatgccatcagcctgaaatgcctcatagagttcctggccggatcgtgcgaacaagcccgtcagatctgaaacaattccttcactgctttggaatatgccgatcccaaggttcttaaatgtattgagaccgcgtctgactgactcctgcgtcgtatccgccatggtctcataagctgcgtccaatgcccccgtgttggtggccatctcgttcagagtatcgttcatgagctggctgccctgatcagacgtcagcgttaggaccgtattcaaggcctcgaccgaaccaaataacttggccatcttgtcggtatcccctccggtagcctttttaacatcatccagaaagcctaccagccctttactttgcagtgcagctgtattaaactccagacccaggctcttcgccatcttttcagcctcagatgagggtttgatgacattggacaacgctgccttaataccagtcatggcctcactggtcccaacgccgttggccgtcagggatgcaactccggccagtaactggtccacacccacgccagccgcttttgctgtcggcgcaacaccgccaatgctggacgccagttccccaaaggttgtctttcctttattctgggtaatcagaaactggtttgccagtccttccgcgtcgctggtagccataccatatgcattcagggttgatgtcagcccatccaccgctgtagttgtgtccgtgaatccaccctttgcggccttaacagccgttccaaccaaatccactacctggtcagattttgctcctgcggacagagcctgatagaccgcctcgttcaattccgacgcgccctctcccgtggtgttggacaggctcatgacctgaccacttaattcatccatggtaatcaggctggtatctaccattgtggataccttggccaggctcgtctcataagctgttcccaggttgtaggctgctactgctcccgcccccatggctgccgtcgtcgctgccaggccaacggcaattcccttgattgagcccttgacggccatctgccccagggatttggctgcactcgtggcatgggtcgcgatacttttaacgcccatagaaacactcttgaaggatatcctcgcggcctttcccagtacctttccaagctctgctcctgccccgattcccagcttcagatggggcggaagctgcttgataccggtgtccagcttctccctggaaattttcttagcctgtccgagcaggtctttgaatccggttttaggcgccttgaggccctcatacagcccctccacgccatcggtcagcttttccttcccgacttccagcatcccatctcttaatccggcgacctgcccctcagctacacctgcagcgttccccgcttccactaacggcttggacagcgcatctcctggcggcgcatggattccgttggccaggttttccacctcgtctcctgcggcccttgcttctttcgccacatcgttcaggccttccccagcggcgtccataattccaagttttgcctttacctcattgatgccgtccgtcaagtccgcaaatgggttcctttcgacatcaaaaccgatgctcacgacatcttccctgattatggccatatcctgtcacctgcctttcgcggctttgtctgccgctttcttccttgctcccagaaggaggtcatacgccgcgttggcctcttttatttcggatggcgacatatcccagaataccgcatggtaatccatgccggcatccagcacaagacgccacccgtcccatcgctctctagccctttgttttgcctgcgccggtgtcagtcccgtttcgaaacttgccgtacatcacatcgcgcccccaggtcgtcaccgcattgtattcctccatggtctcgaaatcatccgcagttaaccccttcggttccacgataatgttgttcaaaatgtactgtcccagcttttcagtactggtgacgctgcttccttcaatgtacgagctgtcaatcgcccggactgctgctgagatgccggagaactgtgccacatacttcttcccgttgaattctttttccaccgtgtaaaacttactcttatccatcttttctacctccaaaataattgaggacagctataaccgtccttagtctactgtgtaatcaaatacctgtatttcaaattcccggtcggccagttcggctccctgctccatggtcggcggtttcttcatcatagcccgggaacctccggtcttttcaccgattgacttgttaatcacccagacatcaaacatgctcttagattttgcaagccctaacaggtagcttttttgcgggctggtgccctgcacggtcagtgtgatggtgcccagctgattattactctggttcacaacaacatccccttgggcccctacactggtagtaaaattatcctcatccttctcacaggaaaccatgtcctctcccagaccagtaatataaacaccgcctactgtaatcacacagtctttggggtcatatgttcttacatccattccaattgcctcctcttatacttctatggtgccgttgatggttgcgtagtgaatcgcgcctgccaggtcaaacgagaacctgccgcccttataagtccttgatgcccggtccgctccactggtttcctctctggagtcaaagtccgtggcgtagagcggtactccgtcatcatccacagcgatgatacccataatggaggcatccttcagcacgtttgtcaccacaccctccagctgactaatgcctgtattatcaaaggcaagctttggagagctgttgagcagcttttgggacttataggcaatatttttaattatataatccttgcagtcgatgatgtccgcatattccccgctcattacagtcccctcgctggtgacgatgtccccagccttccgcacgatacagattcccccggctttgtggactgcctcaatctgcgcatccgtaagcgggtcaggctcaatgcccttgataatcacattcttgtaggtaaaggaccctactgtcagacctgccgtggcaccaaccagggcgccttccactccctcatctgaaccagcatagacaaccgccatggtacggtccagttttccgattgcggagagctcggacacatccgctgctttaataatcaacatcttatcttcggttgtctcaatatacgttgccaggtcctttaaagtgtcatccccctcatctccaaagatgggaataacctgccgaaaatccttctccttaataagattcaacgtctcagtcaccttgccggttccaacgcatatggccacctttgcaggccggtcattctgcatgaacagtttcaggcactgtccgtaaattggatggtcctgggtaaagcctgcctccatcacttcatccaggcttccatactccgcatactcttttgccgccgtccccattccctgtataatcagagggacaccaaatccggcagttccggctacctgtttctgcgtgatttttacaaccacatcgttttttgccatgttttatcactcctcttttaattctgctgtgtcaattgtttccccgtcccgcgcttccactacattcataatggacaacaccgcgtcaaaccccttccggtattcatattctatcgtcagaagtgtatccctgttggttatggcccccacgttctgtaccacaatgccgtggtcattcagatacaaacgtccagcctcctccagccagtcctttgccttcatggcagccagctgcgttttgttgtcattgtccccctgtaccgtcaggctccaggtctgcgtgagaggcatataccgctgtccattagatacggaatacgtccctttctttgtatccatattcagcacggtgaacgatatataaggataagtcggtatccgggcatttgcgaggtttgattttaccacctcacatcctgtcgcattattcagcccctgcgcaacgatgatattaatgttttcctggtctatcaaatgcacccacccttttcagattgtagacgtaaaagcctgcataatcggaataatccatgttttcctgcaccttgtactttgccccgccgcagacgatatagtgcgccggctccagcggaatttcggttaatgtaatgaactcccggtcctgttccgtgtaggtacctccgctctggtaaattttccgttccatcattggaatgaccgcacctgtaattccctgtgatggcggcgcctcgtccggtatccattcgccgcctacatagcttccgaaggacgattcggatagcaattgacaatccgcactatatttttttatcaaacgttcaaaattgtataataatcccatttcaatccaccttatgtgtaatagagtctatcatctcaccaccgcccggccctcctaccagaggattgctgcttccctttcgttctattgtaaatggatgatttggaggactgtccaaagccgtagcaaagtccttaattgcggactccaaaggcaggccgacaacatcatcaagaaacatgtgaaccgacatatgaccggacatcacatcacaaagcaccgcttccgcatgatccaccacctcgtcctttgcctggtcgtacccattccgcaaaaaagcccgctcgggtatcgtgatatatttcgtactgtcttttagatgcagcccctggctatgcagataagcccgcatcctgtccgtcacctgtatcttacagccgtattcatggattcctgccagccaggcctgttcaccgaatacgccgacatttacccgccggccgttcagttcagcagcggctcgctccatctctggaaacttatttttcgtggtcttccacttcacacccatcagctccaccttctcttacatgggatgaactttacattcggcttcagataagccttaagtagctgcctggcaaaagacatcgtctgctttgctacggaatccgtggtaaagctctgggacatcgggcctacgctctcacccgtgaccccggtgtcccggctgcacacctcactgaacttcactaaaaaaagcctggccgatgatggcagggctttgacggattctatatccgtgatatcaaattccaatgtggtattatcccggagccattcaagaccgctttccacaaacagctgggatgaggctggcaggagcagccccagattttcaaattcctttgctgtcaaaggccttcacctcccactatgcctccttgactgtcacatcagcaatgccggctgcttttgccttccctgccgaatcaatctctaccacgacaatctggctcccctttactgccttaatgtcatccgttccattccaagccacataatctgattctgtatcacagacctcattgattaagggagtggtaagtttctttcctgtcttatacacataggtattgttgttatccagcttgctttccgtgattgtgaccgctgtcttcccattggtcgtaccggctatactcgccacggtcagctccttcatgtattccgtgacaggtaccgtcttactggacttaagcttatggcgcagacataccatggggacattcttcagctcctcgtccagactccagttctccggattggacaggtccgaattccttgcatattttctcggctttccgtttttcagtttcccgaaatcagcggatgggttaaaggacaacccgcgcggatgcatgacaagacatctgcggttaatcaggtaattctcagcagccagtttctttctgtccacctcatacccaaccagtccctgcagcataccatcatccctcgcgaaacatccctttccaaggaagtaggtgtcaaacgtgccgcccagcactggcatactatcgtcaacaatgaccatgtaccccaaataatattctatctggattttcaagtcagaatcatattccgttgtgatctgctgctgtttctgcagctgggtataggttgcggaatgcatgaataccaggcctaatttgtcataggcgtcccccatgaggttcttggcatccagggttgtatcaacatcaatatagttgtccgtcatctccccgctgatatccatgacatggtccttcagggccatcccgaatactcccttcaacgtgcttaacataatgatgttctcacggatgatccaccagtcagagcccagctccccgatggccgccatggggtccgcacctccgtatacctgtgacaggtctgtgtccccccaagatttctggcggaccaggatggtcgcgtatccgctaccagtctcaatcccttccggttccatttcgtactcgccaaacacttcatcctcgccttcaagaggtttgaaatatggcatctgaatcagatgaccgcctttcggggttccgttaatcaactggcttactcttgggtccgacgttgtgactcctgacctcaccagtttcgatttttctgtggtcctcctgattgtgtattccgcaaatttatgcggctggataatcatatctgtaatcgtagtaataggcatagtctattatctcctttctcaaatacctgcactggctttcatggtttttgccagctccgggtcattcagttccagttccatctgtttcgtaaggttccaggattccttaatccaagggttatccttgcctccgccggcattgcccttgcctggggtgcggccattggccttatagataccatcggtcgtgttcttcgcaacgcgttgggcaaacttttgcagggctttgacccttaaatcaatcgccggctcgtccttccccagtacaaactccaccaggtccagagtctcctcgctgccatcgtccagccccgccttcttcagcgccttaatggcgtgcatgcggttcttttccatttgtatttccgcctgctggcgggcaagctcatcctctttttcctgaagctccacctgcctcaattcctcggcggtcatcttttcttttcgggtcttttccaacttatccttaagcagcttattttcatttccaagcttgttggtcgcacggtccacagctgattggaccgccttcgcaatctttgtctccaggtcatcctccaatgggtcatcctccggaggctcatcttctggggaatcatccgttgggtccgccttggtatcatcctccgcagtctttgacatctcgtcatattcctcctgggtgacagccccggattttagtaattcctttaattttgttaatttcatttttctgctcctttcgagtccctatctctgccccacattccaggagttgcagatggcaggtccacatgtgttgatgatttcaccgtcccacgttccgggagtgacggcaggacagtttatagccttatcccgggcaataaaaaaagacgctgtttacgccattttccgttgcgatatcgcaacaaaaaagtaccctgttttcacaagatacttctccaacacatcttcaccttatttttgaacgccacaaggataccctgttggcgccttaattaaatcaatttcatagggaaggactattccctgagcctttgcttcattatgcagttttatagactcttggataaatgcctctgtccatcccagttccctcatcctctctttgtattcactctctgtcattacctcaaccccatcctttctgcttgctcaatcatcttttcgtattctgaatactctaaaataattctactcccaactgttttggcaatctctcgtggctccggattattacagtactctgcccaagcttctgctatcatctcaccgtatttgttagcattctggttgttccatgcatacgttgataacccctcagtaatttgagcctgactcctagaatcaaacaaactctttatttccggaagatttgaaatgcccaacaacgaatctaattgatgccccacttcgtggtccagtacagatctgatggatgagcacccttcgggatgccattttttagaaacatcattttgtaatgcttcaagaaaggttgatgaggacttcccccattctttgtttacggttactccccggaactgtacaaaatccggcctagatggtgaccagctttgcgcatatgtattcttaccaacagatacattacgcataagtgcccgtaccttcttttccgcgaatggctccaactgttccttaggaagagaaggattattttttatcaattcatccagataactgttttttgcaacaggtttcaatgccttgtttcgttcgtgacattcaccaacgaaaccaaaattttctttgagctcaggaaaacgcctaaaagtatccgacagcccacgattccattcattggcggtggtaacatccacccctttataagacacgtttggaatccccagtgtaccctttgcatattcctcagcctcttttatagttttcgccggctcaaactctatcttctttgatgattctattttatcattttccacggtctttttcaaaccatacgacaaataacaccggcagttaatatcttcccctgccacgccgctctgccccggcgccaccgccttagccccactgggaagggtgaactccttatccaccgttattgcaacaccgtccatcttcttgtgattgtactgccggttcttccctttggccttagctggccggacgcgttcatccttcttggtccgccaggtctttaccatctgcatcccactctccccggatttcagcacttcatcaactgtataggctgcatcatggttgccggcctctctcacccgatgggtctccgtcctaacaatccgaatggccttcccgtaatctccctccactgatttcttgatgcggttagccatggtactgtatcggtccccattcatcaatccgacgcttatatcctgcttaatgtcatagatgatttccttcctgtgtttctccagacggtcattgagagtcaactttgacacgggattttccacagcccggcggattacatcaggggtacaagcttttaggccagtggtaactgtcatgcccggagcggcctttttcacacactcaatcatcccattgtatgtgtattcataggtttggtccaccgtgctgcgaatgattcgctttacctctggggagatatcattaattttctgttccacctcctccaggaaccgggcataatagccatgcttctgcaggattgcataggaaagctggtcctcttccgcatacaaggtatatgtgtccgccagataatgacgaagatccttcattagcgcctggtaggtcctgcggatttctgtctcggcgcccttctcccgatgttcttcaatgcggcgtacctgtgccagaagccggtccaggtcataatcagccatctatttcatccccttctggcgggttttcttctctattcccccttggaggaacgtccgcaacatcctcgtccaggtccggaatatcgtccttctctgtttctatcagcctcatcacttcatccacgtcatcaatcatagacaatgctccaaaggcaatcttcttcggcagaccagctgaaatcagtgcctgcaccgcctgagcctcgccaaggaagtccacagggaagttgtgattgtatttgacgttgcactgtaaagggtcgaatggaatcccttttttaacaaagctgcttgccagaagctcaaacatatagatagccgcgctgacccgctttgcatcaaatgtgcctgccttggtctccagtcccgtcattttaattctcagagcgatgccagaggaggccgcaaactcagggtcattaaggttcggtgtctttgaaaacctataaatattatcctgcgctctgtccagatgactgttgacaaaatccccctgaatgttttttgtcagataatacacgtcatatggcgattccggatcatctacatcaaccccaatcactccggtagcattggcccttgccattgtgtcctcgttaatccggcagtttttaaaaaccatgtaggcattggcaaacccctcaatatcattgctgttatcactgtagttgccatcatggtcatcaattagagccagctctttctcggcatcccctatcaactcccgattattagggataccctgaagcggacaaaaatcaaacaaatgcagctttgaatccacgaatctgaatgcgtcaagctggccttcataaaactgcacggacacactgtcataaaactcggccttccatgtctgctggtcgttaagatccaggtactgataataccgtatcccaaactccggctccatcatctcggtctcagacaggatgatggtctcatatggcggcgttatcatcacacgttcattgcccttagtatcaacataaaaaagacgccctgcatagccacataccgcggcaaatttggtcgcctccatatctatgtcgaacatgttgttgcgcttgataaaatcagagagagccttacttgctgcctccaccgcatcttctccgccagtttcttcttctgcctggtagtcatccccatacgtataatttgccggccttcctgcacagaacccgacttttatatcattgatttcagaaaaaaaatcgttattgacccggttattaattgcgctctctgcctgatggtccccctcatccttaaaccgcggctccctggtaaaaatcggcaccttgtctgtctctgtgcggtacctcccgtacaactgtttcatatgttcccgacatccctgatggcggcgtataatccgattcaagagttccggggttattccccctttccggatagcctgaatttctgccgaaaaatccggatattccatacaggcctgccgcccaacccatctatccatggtcccttcctcccttccggcgctgataatacgccacaatcttcttgtcaaaaaacggcctgccaccctggggaatagttaaaccacaccggacacaaacctttacatcatttacctgtttgaaatcatgtgtacacatcgcttacgcctttctacagccggaaccgcagggcatcgcctttcaagtcctcgacctcataatcatccagcgcataccagatagccgacagggtatgagggtcaatgttaaactcgtcttccacgatatttccatccttatcctctttaaaggtcagctcctgcagctcgtttatggtgttcggacagttatccaggcagacaatttttctaaatctcttgactttctttgtgtacgcttctctggagcctttaaacttgtggcaggactgcatccggaacccctgtttgcggaagtaccggatagtctttggttctgcgcagtccgctttaataagctcctgcgtctgtctgaattcatcaatatccttttctatttccgtatcatccttatccctgctatagtattcccatatgatgtacaggattttctcatcctggtcaatcaccagccgcaataaagcgttgtaggattccacaaaaccaaaatccaggccgttctttttgagcggatgacggattctccggatttcattcatacctttctcatatggcattgtttcaaactgtgggaatactaacttgccattgacgccaaaccgccctttacgagcaacccggtacaagtctggatcgtgctgctgcaactcgtccagctgctcgatgtaatccgccggtacaaagtagttgtcatccacagtgctgtggtgatagtacgtgttgccgaccaccattattcggttctgatacagttcctcatcatccaacaccttgtagccggctgccttgtcctggaaaaaatacttgtaaacccagttccccttactcacggggtttgttgataggatgatatggttactgagggtcggatgacggagacgtcccagaatctccttgattcccgcatacttgacttcggaacactcctctatccagacgatactaacaccattcagggatttcagctttgccggcttgtccatgcctttgaagatgatgcggctgccgttcctgaagcgcacctgcatcggagacgtggtaaacgtgatatagtccgtcacctccatggcttcggccacttccatcagaaggtcatagcaggaatcccgaatggtatcgaatacctcgcggaccaccagggccttgcgtttttcctccaacagcttcttaatcagcttcacggcaatatggtagctcttagaactgccataaccgccaacagtcagatatatcttatggtcccagtcatggacgaaatcaaagaaatggtcattcaatacaaattttacgttgtgtacatcagccatgtacctcgcctgccttctcaaaggtaatctggattggcttctcttcgtccttctcaacctgggacttcagaactgcaatccgcgccttctgctcctcactggccagctcccagtttttatgcagcagctcatcatactgtttgataagcccctccagcgttttctgggctctggcctgcgcctgcaggaaatttccctgcttgtcccaggcctgctgtacctcccagcgctcctctgtgaccgtctccccatccttttggcctatcttagtgatggtcttatcatcccggtccctcacatacatgatggactgcgcccggatgatggcggcataggctatctgcacctggtcccaaaggatgtccagcgggtccgtgggcatttcctggataatggaaacggtctcctcaggcaagtacttgctgaagaaaccgtatttttctgcgttcttattctgttttggagcgccgtagtcagcagcatttttattacctttaggtgctccccgatttttaaccgaacgttcgctatttctatccgaacgttcgctatcccacttatgagtgcatttccaccggcggaccgtcccttccggcaaatttagttgacttgcaatctcaactaatttgatgcctttgcggtacatggcctcggcctgttctattctcgaatccggcgctctggccatgctgctcacctccgatttgtttgttttgcaatataaaagaggtcgccggagctacctctctttctctttctctttttcattatcattttctttttctgatttttttacggaactttcttctgattttttctttctaaatttatacccataaagaatacgtcctaaactaccaataatttctaaattcgcctgtacaatacttccgattattcctctgtttgaagatgtttctaaatcaatttctatggccaaaatgtccaaaatgtgccaagtcgctccaacgagactgaatagtgatataagtgtcgaaaggaacataataaactgtatgatactattagggttcttcgcttcttctggatctgccaaatacaaagctactgtcaccactaaccccaaaatgccgacaaagcaggcaaagaaaattccttttttgttgattttttttacggtatagtaactttctgttttttcttcttcaaacttgaacatatttacgatattctgtattaattcagcctttccttgttcggtcataaatcgagttgttgtaatatcatacataagcatatctcttaaatcaccatctgtgcaaatatacttttctggaaccgaaaactccattgaaattgcatttcgaattccatgaattatctgttcatttatctcaattttttgaataacatatggtctaattgcatcggcatacttttgattagctgcctttatctccttgttcttttttcggatagaaaatacttttattattatagttgcaataattgccgtaaatatcggagcaatccatgctataactatattatttgttaaaaaagcttttatatattccacaaaacatcccccttgcattttcttccatcatacatcaaaatccgacaaaagaaaagcccccaccgtatcagcagggacatattcaaaggagaaaatcaacgtatctggaaaacatcatgggggataaaaccagatacctcaccgcttgtgtaccctgcggcattgtcccgtaatgtacaggcctgtcttatgagggattacacaataccggttagccagccaccaggctgtgatacctggcagccgctgcttaaatggggaggatgcttccaccctctggcttccgcatgatagcatattagcacctttcaagcgaacatggccgaacatttttaaatttcttcaaaaaatctattatttcttacccggcagctgtcctccgtaaacttaacccgcctctttgggaacatccggttcatggcctgtgccaccttccaccaaggcaggccatctatgtaatacagacggaacatggtccgcacctcgctctttggtatgccctgtatatattcctccgcctggcaggtcagctccagcagttccgcctccttacgcgccagaagctgcctgtaccgctccctcagccgctgcttccgataatgctccggcacggggtatcccgtgaccttaatgcttcctatcgtcccatcccgccttgtccccttcaccgtatctgatacctggtgcggctcctccaggaacctgtccagcttctgaatccgtcgccttatgtcctttatctcctctttcatctcgcaatactgtatcagcacctccttgtccaccggcatcacctcctcctgcatccaggtgtggacacgcccagcacccgtaccgtatcctacccttgttgttgcgctggccatcctttttgtcctttcaaaatcacacaaatttcagttttacagattaatcatcatcgctaagccaatcccaaaactcacactcgtctgctggataaatattatcagtgctttcgatcccatcggcgtgtacattttcacatccaaaaatgttagacaaagcacatgctaaaccatctgaatctacacaatcgccaatttggtcaagcgcatcctccacctgttccggattctcacattctatttcaaacgttacatctgcatagagcttttctcttacctggaacttaactttcatcttatctcccttcctccggttctcccggaaatgttaattttctggttcatcatgatatttcaatgcctggccgcaagttggacaaaaataatcatcatcctcaaccacatccgaatcgcataccggacagaagcactctgcctcatcaccagcggaataatatgattgatatgccggtgtccacaccaccattttcggctcacttttgtcttttaaatattggacttctcctggcgtcaggccggtatcctcataggctttcagcttttctttctgttgcagcatgattgccttcacccgttgcagtaccgacaacgtaaaagtattatcccgttccgcgttggactttattgcagcatccagctctatgatgtctttttcaaaatctctttccatccaggctcctttctccggttctcccagaaatcctaattttactcactgtcttcacatgtgcctaaatcgtccagataaataatatctttcccgcactctccgttatctcctcggtaaacacaatcatcattattgcaaacaactattgtttttcccatactatcatccttccttcggcctcccggaaatgttaattctgattacagcagtcatcccccgactcctccacaaggtctctatccatctgccttattacctcgggccactcacacagcccggtgtcctctatctccactggtctccagctacaggtattgcagtccttaccatcatcccccgactgtgccatccttcggcactcctggtagtccttctccatctcgtccgacacatccaggcgcagctccgtatgcggcgccgggaataatttaatctttctcacggttctcctccttcatctcctttataactctgcacactgtcccttcatgcagtcccatatcatccgcaatccaccggttgctccggcctgcttcatgcaacgccatcaccttgcccttgtctaccctcttggcccgtttgggatgaccgtccactgcggacctatcttccacgcaggaatccctggatccgcttttatttttgtcaatagggaggggcatcatctgctcaagcctggaattatccattgctggttcattccggaagaacagacagccgcccagcaggttttgcagtgtatccggtgaatagtcctcccaccgcttcggttccggggtgttcggtgccataatgttaatctcctgccctacggcagccagccgcagggcctctatcatatcaatctgtttcacgaacataatccttaatctcctccagtctgctgactgagacttcatacgcaatccgtttctcacactcggtctcactcagttgcttcacatattccctactctgtacccggccccatgtcctgaccctggcccccacctcaagaccggatacataccgggcattccggccccagctgatgcaaggtatgtaatcagacttgccatacggccggttgacggccagaaggatgtccgcaatctcacgtcccaggggagtcctgcgataaaccggcggcttacagatgtagccatccaggaatatctgatttgtctttgtataatctgtaaattcctccatgaaacggacctcccggacaaaaacggacagctccaggcggttcctgatgccctcatggcggttgtaggaacggaactggccaatggcctccatcgtatcaccggaataatcccggtgtacatccagcagacgctctgacaccattaacggcaggatatccgcctggccactgagccgcttcacagcaatatccaccagataaaagccttctccaaaagcctcatgactaaaggtaaattccgatacaatctcaccaattacacttaccttgttgttttcaatcattttttctgacattgtacatcctatcctttcttcaccttctgaatctctttcagtttctcaatcaataatccccggtttgcctcacaatcccggaagaacttcccatcccgcagcagatagtactcatgccggccgtaaccatcatgatatttggcctcatagcttcctgacgcatatccatcgaatatccttgcgtgatacaccttgaccaccatgctggtgccgtcctccaggtcataccggtagtagcgctccccggtctgtttcgtctcaatccataacggccacgtcacatatgcatccacaaaggcagcccgttggtcattgttctttagcaccggcagttccggctgctctggcttcggcggcggattcacgatgtcatccaaatcgcacacatagctggccagggcacaaacctttagtttcaaccggcggatatgtatgtcattttcatccacatcacattttagcccatcattaagcagctttttggcacgctccagttcatcctgggcaatctgcagctcggtcatgggttcctccggggcccggatgtcctcctccgtttctgaaatctccgtgaattcaccatcaatcacggtatcctgggattctggcataccaggaacatcgttttcatgttctgatgcctcgtcctcagcacttcccaagaggctgagtaattcctttacgtacttcccccaggtcaagctcagaaatgtctcgcacatattatcctggaaatgaatccgttccgggccgcattgataaaagccgtactccgttgacccgctgttatgaggttctccgtgattgattatcaactcctgcctcagcagttttgcgttctcgtcattggcggcctgcgcacacggcttggacatgtgatgctgatagaagtccagaacacattcctcctgggaagggatggctgtttttccctgttgcacatccgcggcatccagcggcggacaatccggctctgtctttgggggttccagatgctccgggcgccgctgcgaactataacattccaactcacagttaccgcgcctgacgcattcccagcagcacacccggctgcagtcctccccggttcccgggatgagcttatgggcctcctccagggtgcagtcaaattctggccggtggatgcacttccctgacttctctgggtggggttgttccggctctggttccggctgggcttcctggcggggctctggttcttgctccggggttgcgacggtcgcaacttttttctcttttttcggcttcagtgcccggatggctttaaccgacatatccgtggtgacctgctcctgcagctcctcctgcataggtatcatctctatcagctggctgacattgtacgactcatatgcatcttccagcctcggcagttcccctggctctaccgggattccgaatttatcatacaggttgatacacctggacgcccaagacttgtccttgccgtattcatcacccaaaaactcgttaaagctgtcataaccttgtccctgccacagcttttcatcccggatgattttcaggtaatagccgaagcctacaaaaccatttttgatatccttgtaggatatattggccagccgcctggtatctataaaggtcaatcctgttttcttaacttcctccatcacgtttcccctttcacttttgctatccttgccttaagggccgcaagcagggaatcctgcgtaacctgcttattctgcagcgctgccatgacatcctcatccatccccccggatacaatcaagtggtggataataacattatccgtctgtccctgcctgtgcagcctggcgtttgcctgttgatacagttccagggaccagttaaggccaaaccatacgatgatgtttccgcccgcctggaggttgagtccgtaagcggcacttgccggatgcgccaggagcacatctatcttccgctcattccactggctgattacgcccggccccttaagctccgctaccctaagtcccttcggaaggcacttgataatacgagacttgtcatgctggaagttgtagaataccagtatcggtttcccctggctgccttccacaatctccttgaatgcctccagcttctctccatggacctccactgcatttttgtcattgtcatatacggccccattacagaactgcaggagcttaccggaaagcaccgctgctgacccggcatccagtgtggcctcgtccacttccagaagcatctcacgctcaaacttctcataagccgcctgctccttggcgtttaaccggacgtgtatgatattatcgatgcgctccggaagctgcaggtaatccttagcctggagactgatacagatatccgctatctgctgttggatcgcttggtcggccccgggtaatggcgcgtatgaaaagatggtgtcccggttcctggatgccggagagaagtattcatccctgtattggcctatccttgtccccagccgctgtccctggtcaagcaggtatatctgtgaccacaggtccagaaggccgtttggcgccggtgtaccggtcagcccataaatccggcgtatgtggttcctcaccaggcacaggctcttgaaacgcttggcctgcgggttcttgaaactggacagctcatctatgattaccgtgtcaaacggccaggcgttgcggtaatggtccacaagccactgcacattatcccggctcagcacatacacatctcccggggtattaagggcctttatccgcttttccctgctgcccagcacggggataatccgaagcagtttcagatggtcccacttcccagcctctcgggtccaggtatcctccgccactttcttgggcgctattaccaatgacttcccgacctcaaaacggttataccgaaggtcattgaccgcggtcaaggtaatcacggtcttaccgagtcccatgtcaagaaacaggcccagggcaggatctgatatcatacggttgatgcagtacctctggtaatcatgcggtacaaacttcatggctgctcccgctttcttgattcttcaagaaattctttcagtttccggtcctgccaggccggatcctttcctgcatctgacgctatatacatgattgccctgcctatatccggctcccggtcaagcacacaagctgcgcaccccagttcccttagggcatgtatccttttactctgcagtactgttgccttcttcccctcctgtttaagctccacgaacccgatccggcctccggggagtatcaccagcctgtccggcacgccggcattaccgggggagacaaacttgaatgcgataccgccacatttcttcaccgcttccgtgaatttcttttcaagttctttttcaagcattatgacgcctcctttttaccccttggcaacaacgggctacagcattctatatatacatatacgcgtatgcgggcgcaggggtattatatatacattaccctttattttatatttttatatataagaatgttgtcactgttgcttaagggtttaacccttggttttcaggggtttttacagcaacattgggttgttgcctcctgtttccattgttgccttttacaatttttggaatgttgccgggcaacaatctaatcttgtctcctggcttagaacatatcccctctgttttccatagtatgggccaaatggaatggctccagagctccgttcccatccagacagaccggatagtatgctattgatttcatgggcatccgacttcttcatcatcttcaaatccccataaaagcattcacaccatatctctgctgcacacaccctgtcgcgcggcaaaagcaggttctcatcataatcccgccccgcaaagttccagaactctctcctggctgccaggtccttccggctccagtctaccggtatcttcctgcccaggaactcccggatgatcccttccttaggattgctttccttatgctcctcctgctggcgtaccgcttcctccgccacggctccctccagaaacagcttctcgccgcactgccatctcataaaggcctccgcccaaatctggtccacttcacctggcagctgctcaaacacattttttctgctggggatttttccaaggtcaatcggccagaaccgcctgttgcctgtctggtctttcaaaaactctttgtcattggttgttcctacgatgatacaggaacgcggaaatggcttcgtccgccttccgtacggctccctgtagacatcttctgttttactcatgaactgtttgacggtgttcatctctgacttattcataccggccagttccccggcttctataatccagtatccctggatcagctccgccgcgtccttcccttcaaaggttgccaggctgtctgagtaccagtccttgcccaggaatcggaagaacgtgcttttccctacgccttgggcgccggacagtatcagcatacaatcaaacttaatcccgggcaccatggccctggcaacggcggcagccagcgtcttgcgcgtggcatcccttgtataggtactgtcctccgcaccaaaataatcagtcagcagagtatcaatacgcggaataccatcccagaccagcccggtcagatattcccttatcttatgctgcttatggtttgtcgcatatacagccattgcatcatatatcctctctttcccggttatcccgtatactttctctatataatgcctgagccctgagtcatcctcgtccgcccaggctctcagcttgtaattgtcctttggcgcctcccaaggcatggccagtccaacaaccgccctgttcgcgaactcatcatgccagaaccgcccgttcagttttgggtcatggttcagtataatgaggacattgtcgatggtattgaggggctgccctgtccgtgagctgcacttaagctctcccatccattcaaaatccgggactccctctgtctccccctggacaggctgtgaaaagtcctcctgagccttccggtaccgctccagggccattgccttggataccggctcctgctgcagggcaaattcacacatggccttaaatgaaggcagctgtgtcacaggggtttccggtttcgcgtcataatcctcctcgttgaatttatggaggcggaccaggtcgaacgcgttgcagagttttccgctggccggatccgtggcgtggtggctgtacaggaagttgccgccgtcatataatacggcaccacccatggttgagccctcgctgtatgtataccggccctccccgcaggggatgtacgcatccggtataaactgtgcgatggcttccgtcacatcgtatgcccggcagaacgcacctaccaccccttgcttttccagcgggtcaccctgtttctttgccgaccggtccctgagctttgcggcccccggtacctcaggccattccgccacgttgcgccagttttggtagagcctcagaaccccgtcctttgacaggaatggcttatccccataaagaaatacatactcgctgtccgcgctgcagcttggccagtacatgagccggaccggctcaaacgtggtagggtcaaatatctgtatccccaggaaagccgccactttccgggctataggctcatattcatccgccgtgcatgccgcgtccaacggaaagatgatacgcagcctgggggccgcgccctcatgtttccttgtggaatatacagcataggaacaccccagtgcctccacggcattcagaactgcctgtgtccctcctggaatgatgttgtccgcatccagtgtaaccaagtgcctgtcaccggcgttctcattcctgcgggcctccccgttcagttccccgccgacaaagcctccgacatcctttaattcatcctgacgcgcctttgtaagccctttatactccgcaaaggtttcacccgtgcgttccggcctggatatccgttggacgaaatccgaccacaggagctcctgccggtgccaggacgtagctttcctgctcgtacctactgatattctgattttcctgtcattcacgagcataagcctactcctttttgtaataatctcctgtgaatccatccgcattcagaggaagcccctcagcccatgccggaggcctgcacatgaggcttattgcctcctccagactctgcctgccgcccttgggaatttccagtatcacctcgtcatggatatggaagttaatccggtaccctgccgtatgcaggttcaccatggcattggccagacagtctcttgccacggcctgtacgatattctccgtgagtttgccgccgtaggtcgggagcaaatcccatttatggctcttttggttctgccccataaaatagatccgcttgtaattcctctcgtctggaatcatctgcggtttaaggtagaacagcttccggccgcttggcagggtaaccatcatccggtccgtgtcccttgaaaacgaaataccgttcggcagggatgatatcacaccatattccacgcattccgccgcgtgtcgttctatgctgtaccacaggtctacaatccgtttgtttgatgcccgccacctctgcacgatgtctggcagttcttcttcatgaaggcccatccgcagggcgcccatttggataagggccccagccgcaccttggtatcccaaggccagctcagcaacctttcccttactacgcagggcgtattccgggttccctttctttattttctctatcggcaccccgaacatggtactggccgaggcttcataaatcttcccgtgtgtccggaacacatccaatcgccattcctctcccgccagccaggcaatcacacgcgcctctatggccgagaaatcagccacggcgaaggtgtatccgtctccaggtataaatgccgtccggatgagctgtgagagcgtgtcaggcacattcccgtatataacccggagggcatctattttttgtttctgtacaagcgccctggccgtatccaggctgtcaatatagtttcgtggcaggttctgcacctgcacaagccttccggcccatctccctgtacggcaggccccataaaactgcaggagcccgcgcacccggccgtcatcacacagcgcgtcctgcatggcctggtatttcttcaccgaggtctttgccatctcctgacgtatccgaagcatagcctgtacctcatcggttccggattcctgggacaggaggtcagcaaccgtctgcttgttcagactctctatctccacgtctgcattgtttatgacccattgtttaagctgtgctacactgtttgggttatccagccccgtgatattccgggctttctcagtcagttcttctgtcatttgggcactgattgccagcgctccatttatcagggccgtatcaagagccactccgccgatattaatcgcctggtcaatcacccataattgatgctcgaatgcaggcactggatactccgccagccggttcttaatttcccgttcggtcaccacatcctgtccgcagtattccttaaacagcttccacttatccggagcatgtcccggaagattcctggtacgcccaccgttccgtttcgtacgggcgcatggggtacagaaatatttaatcagtgacttgcctgtggacagtttacgcttgtcttcggtaaattccatggccctgccgatggcatccagccctcctgcatatccgcagtaccatgcatggaccatggtgcattgccattgctccagatgtgtctcaaagaacttactgaggcagtaatattcaaatgctgcattgaatgccgtcttcacgacttcgggcctgtgcagatccatgactgtgtaatacgggattttctccccccgtgctaggtctacgacctgcaccggattatcgtcataagcataggcaaacagaaggatttcaaaatcaggggactgtacatatttgtacagccctgatttccggatatctacactgctatatgtttctatgtcaatacttagggtcctcaaatccccatcactcccccggctggcagcggccttcccgtcaccgggtcaatcgcctgctgctgtggcgccccgcctgcaggaggggcgtaccctatgggtgccgccgtatatcccggcatcatcccgggagggctggccggcgcgcccccaaaaccgccggctggctgctgataagcctgagcctggtaggacggcggctgatacgcaggctgcccatacccgttcgtggctgccgcggaacctgcatacgcattggacccgccgaagtcttcttctgctgtcgtcctgccggacagggggtccccgtcggcaatcttctgtatgttgttaagtccgcatcccactccacggttaccatttgtattgtatggataaaaattgaccgttgcccgagcatagcagccggaataaaatgcatttgggtcaaggataggctggatgttgatatccaccacggaaggcctggtcctgcttgatgcacgcagtacccaatggccccggcactcctctccccaaggctctccgttctgtttggtcccgtcaccgtcatacaggggcatggagggtcttgccggcatctgtccgccaaacgttttctgtagtccttcctgcagggcccggttcatttccgccacaacggcattgtatgtattcacatcggattttgggatgagcatggttatctgatacttggcctccccaccacctggcggtgtagacggctcaaacacatgggcgtaacttgccctgaatcttccaactaacatgttttttcttcctccttatattgattctccccaccgaaatcctcctgcggggtagtgtctttttggtatggcggacgtttgtcccccttaggtgcaagcgtgggttttccttttggttttacaataaatggcataaggattgtgttgaagtcatccttattgatcagtttctccgcctcagtcagagttaccggaatccgctcgtaaaacagggccttcttatatccggcctccaccagcgcggcatatgccttatctgggtcggggagctcccggttgctcctgccctccaccaatttccaccctgggacatcctcatccgccagcagtttgtcgagggcggccgcgcggaccttcttgatccagggtgctgcgaattcaagaaagggaaggattgagccaatttcaccattggtcaggagctctgcgggtatcatcttccctgtaattgggtccgtatgtttctgcagggccgccatgttttcctccatccggaaccggcaggttcccgcggcagggcagaagcagtcatcacaccaggagccctgcctaaaatctcccttgccttcccaggccagttccgctgcaggctttacgatctgctctgaccaggtttggagctggctggctgcaagttcccatcgggagaagttctttgtccgcggctgcacaatatgcaggatgacccgttctacaggaaatacgattccgtactcagcaatagccccgaccgcatacagcatcatctgcggattttcctccgcactgactgtaatgcccttaccatacttgaaatccaccacatggcagtctgtaccgctcagaatgatacagtcagagaagccgtagccatcccgggcgacatgcccgtaatggacttccttttcaatcacaatcttaggcggcacaggatagctgtaggctatcttctgtatgtagtccacatattcgtctgtatagcgctccatctcagggtcatactgcccgtgcttctttaattgattgtgtgcagttttaaatgtcttttctggcatccccggctcaatgaataatttccgcagcttcaactcacagatatcgtgagccagcgtaccttcttccgcgtagtcagatgttgattctggaaatgcttcggacagtctcgcagatggcgggcagtttatccaccgtttggcactggatgccgacaacaacgcgtgtttcctctcttctgccattagatgtttgcacctgcccctctcaactgcgtcacaagttccggataccgttcaaccggcacttgcatgagggacattgcgccaaactgtcccagtatctgcatcacatagtcccgcttgccctggtcgatgagtccagtcagtgcaatggctatctggtcctgggtataggattgtgtggtggctgtcgttggcagtgctccctgtccggcctgtcccgtgaagggctgttggtattgcatcacgcctggctgtcctgtagcagctccaggaatacctgactgctgtggccccgaagctgccggtcctgggttctgatagttcccagccatctgcgttgactgcgggccggcaggagtagattcactaaaggaagcagtcacgtctccctttcctaacgcctgcgccaggttattgattgcctgtgcgattgtatcaagtcctgtaatattaatgttcatgtttgccatcttcgttttcctccgttttcatattcatggtttccgttgtattctcttccctgcaggagcatttctcccccgggtcaagataggccccacaatgagggcatcggatataatagctcatgcggcgtgcctccttttatggttgatttttcctccataatcccttacaataagaatgtgctaaactatttgtccatgggcctcttgcggttgccgccgctggggtccatctctttataatctttcaaaacattaacccatgcatcagcaggtaaagcggggtcattgattgcgcgtcctataccgttaataatgcaggcggaagcatattcctctccatattcctcacaccattcatgtagcaggtctacaatggcctctaagtcatccttctttttcattgtcctaacaccctcctactctttgacatagacagacttggtatcgttgtcatataccagccgcagcgtgttgccgatatcgtcctctatcatggcctcgttgccatccatgcccagcttgatataatgcatgtccagtccgatggaacggcaccaatccctgaccgccagctccgcaatgctctttatgcttccaaacaattctcctcacctcccttctatgcaaatatcagctcatactttggtctttcactctcatactcgaccatcgcgtaaaaataaccacagttgtgatacaatacaggaatccggtcatcattatcagcacaaccaaagccacttgaacatccttcattctgcttatactgttcccgaagagcatctgccagaaggctggacgcttccctactccttgttaaaaacactttatatgttttcatcctcatatcctcctctcacagactaacgcccatggccgccgccatgaccacgatagataccatccacatccccagcagccagatgaccgccggcacaatccatttagctgccctcatgattgggccgtctcggcgcctcttgcaccgtcggaaggtcaccatacgcctgtgccccatgatattggtcatcaccgcagttgccggtcccacaaaatccacacgccagccgggatactgtgccgctgctttggcgcggatggctaactcagttacttttgtcattggcttgtccctccccttggaatactggataatcttcaatgaattgctccaaatcgcttccccgaatctttatccgacccagttttaatgctcgcaggctcccttttctaatcaggctatacacggtatccgtgttcgtcataagtacggttgctgtttcctccaccgtgtacaacggtttgtatggttctaccatttttccgcatcctccttgttttcttccgcaaaatactccactgggacaccgaaatactttgcaaggattagcaatttgtcaaactttggtttgctacgaccagttttccagtcagataaaacagattgagcgattcctgtctctttagctacttgataagatgttttgttacttttccctaataaatccgcaaattttttgtacaaaaccacaccgcctttctttaatgtaagtgttgaaaatactacggaaatgtgatatgctttgtttaccagacgaagtaaataacatttccgcagtgtgcaaaggttttacgacggaattcctttgtatgctcatactatactatgcatttccgataatgtcaatagttttttcggttttccatagtattgtctgcggtttgtgaaaggtggacaactatgtatgagatttttgaacaattattacaaaagaatggtgtgacggcttacaaagtatcgaaagaaacaggagtcacacaatctacgcttagcgactggaaacgtgggcgaagtactcccaaaagtgacaacatgaaaaaaatagccgattattttggtgtaagtgtagattatcttatgaccggaaaagacgagcccaagcaaaaagcccctgaactcaccaagcgggacgaacgtgacatagcaaaagacctggaaatcttaagggaaaaacttgcgaacaaagaactaggcccagctgcttacgatggagaggacattccagaggatgatgctgacctattcctcgggcaggtggaattaatgctccgccgactaaaggctaagaacaaggagaaatacaacccttataagaacaaaaagtaggtgagcctattgacaagagatataaaacgaattgtcgcttactatcaaagaaagtttggaactagagacccatttaaaatagctgatgctttaggcattgaagttcaaataggcaatattggttctaaaagcggatgctatatgtatcttaagcgtagtaaatgcatatggctcaatgaaaacctagaatcacatgaaatggaatatgttatggctcatgaattagggcacgcaattatgcatccccgtgaaaattgctatttcattaaacacaaaacatttctgcttaattcaaggaatgaagtagaggccaataaatttgctgtagaatttttgatatccgacgatatactgtatgaatatttaaaatatcgggaatgtaccatagagcagacagctcggattctcggttatcaaaaggagttgattgcattgagattaaaataacctatggtatttttgtagaacaaatgaaaagaggagaagagtatgggatttcgttttcataaaagttttaaagtcgctcctggagttcgcataaacattagtaaaaaaagtgctggattgtcgtttggtaaaaaaggtgcaagagtatcacttaatacaaaaggacaaaaaagagcgactgtcggaataccgggaaccggactatcatatagcacctctttaaacaacaaaaaaagtacaacagaacattcggtcacaaggggggagcggtctaggaatacatcacctaaacaaacaccaatttggcccctgctcttaggtattttgtttttaatctcaggtgttgctgctatgcataaagatatcggaaatgcaatttttatggtattaatcgggggagtcctaatttattggaatagacaaaaagtttcacgtccccattctttttcaaaaattcaacttctcgaatggcaaagattagtaatctccgatagtgaaaaacttatatataccaaggagcaattagaagatttgacaaatgatgatattaagcagcgaacgcgtattataaatgactgtaaaaagttaattactactacgacaaatgcagatacattttttgatagatataggctgctggaggagcatagtgattttatagaatgttacaaaccatattttgatgtttcacaatatatcccaacagattttttgaacgcaaaagaaagacacgtaaatagctttattgatagaatgtgggaaaagactatacaaaaagttaatacattaactaccgaaaatggaaaaaacaatcaatttgtaaaattttctactaccataaacgaacatctaacagatatgccttcaggtagtgttgactattataaaaatcagtacctaaacaaattgcattaacaattaataatgaaaaagccccaggagctacaactcccagagcttttcacatagatttctcttaccggactgctccggaagatatcatcagttctgaacaatctgattatatcattcctggagcgtcctgacaaggggcgtattttttatacccaaattttgttgcgatatcgcaacagcacaaggaggaatgatatatgggacagctaagaacaagaaaacgcggctccacctgggaatggtcctttgaaggcgctaaaatcaacggaaaacgcaaccctatcagccatggtggataccgcaccaaggccgaggccatcactgccggcacccaagctaaggcggaatatgactctgctggccgcaggtttaccccttcggacatcagcgtatctgattatctggattattggtatgataattatgtcaaaaccaatctcagctacaatacacaaaaggattatgaaaagaaaatccgtgtgcatctaaaaccagcattcggaaaataccggctggcatcattggagacagatgttatccaaaaatggattgacggaatgaagcgtcaaggctattccaggagcatggttaaaaataccttatcctgcctgtctggtgccctgggatatgcggtatatccctgtaaatacatcaagtacaacccctgtgattatgccagaataccgaagatagttatgtctgatgaggccaaggcacacacagaatatatctgtgtcaaagaggactttgcggccatcattgagcgttttgggccggacagtaatttttacataccgctcatgaccggataccattgtggcacgcgcctgggagaggcttacggcattgacttgctacatgacgtagatttcgagcgccacaccataaccatccagcaccagcttgccaacgagggcggaaagtggtattaccggccaccaaaatatgattctatccggactataaaaatactcccggaatatgaaaaaattctgaaaacagaaatccataatcgcaaaaagaacatgctccggtacggccagtattttacaaagacgtatcaaatggacgatagcttaatctttcaggctcctgccaacgtcaaaattgttggcaaggaaataatgccaataagcacaaaagaaaacggcgagctgttgacgccatactctttcaagtactgtgccaaggtcatccatgaagaattgggaaatcctctgttccacagccattgcctacgtcatactcacggcacgttgttggcggagaatggcgcccagcccaagaccgtcatggagcgtctgggccacaaggacatcaagaccaccatggaccgttatgtgtttaacacggagaaaatgcagaacgatgccattgtaatcctggcagatgctatatcatagcaaccttgcctaccactcaaaaaagcgtaggcaaatggtaggcaaggcaaccaaaacaagagcaaataggcctgttaaccattggttttacgtgatagttccacgacggtttccacatgcaccgtccccggaaacatatccaccaaccaagcctccgccgcccgataccccattttcttcatataccttacatccctggccagcgtctccggattacacgacacatacaccaccttctcggctcccagcttccctacggcgtccataaactcctccgtacttccgcttctgggagggtccatgataaccacatccgctttctcaccctgttcagccatattcaccagaaaacgtcctgcatcattgcaataaaagcggatattttcaattccgttcatcttcgcattattaacagcatccctgactgcatcctgattcagttccacgccaataaccatcccggccgccttacttgctataatcccaatggttccgataccgcaatacgcatccaccaccagttcctgtccggtaagaccggccagtgacaatgccttttcataaagaatttccgtctgcaccggattcacctgataaaatgactttgatgatatacggaaccggcatccacacagctcgtccacaatatatcccttgccatacagcacatgctccttatcccccagaaccatgcttgttcctcttccgttaatattctggacgatggtggtaatttccggatgtttctcccgcaaagccttaacaaagttattcttagacggaaacaccggagatgctgtaaccagaactaccataatttcccctgtggaaaaccccttgcggattaaaacatgtctgagaagcccaaagcccgtatcctcatcataggtccggattttaaaagatttgagcattccgcgtatagtaccgatgatttcatctgctttctggtcctctataaggcacttctccacaggaattacatggtgtgtattttcttcatatattccggaaatgatatttcctcttttgtccctgtcaaatacagcatgtaccttattgcggtaatgaaagggatccttcatgcctataataggctttacaggacagagtccttttagcagttcttccgcctgcttctgtttgaacacaagctgcttggcatactccatatccagcagctggcagcctccgcacagattcagcaccggacagatactgttgctccgtctgcttccccgtcccccatatgagcctcctcttttggaatcctctctccgcttttcagcattaagagcccctccattttgttttttagagactgacaatccttccgcccctttgcgtacccttggtgagctgccatccctgcgtttttctccactgcgctgcctggaaaatgcgccctcatacccatcaaaccgtttcccgctctcacctgcaccatttttaccttctccgtccctcaccttgtgtttactgtcttttatgttgtcttttgtattgtctttcattctgtccttcacgttgtctctcaccctgtctttcactccgtccttcacattgcctctccccctgtctctcactccgtccttcacattgcctctcaccctgtctctcactccgtccttatctccctttacgcctttcctgcttcctatacccgaatctgtccccattcttttaaccgtctttccagccattttaccggacattcctctatccgctcttttatccatctttctatctcctcgtattcatccataattttatgcgcctacagcaaattccaagttactgtcaacttcattcaaacatgcttaaccttctctaaatcaaaatccatatggccattctaccatatatttcccctaatgtataaccatataaaccgaataaattacatcctaaaaatcacatctccctgctgtcaataacaggataacataaatttttgccatacctgttatgaatgccctgtccccacatccccagccgccccgccacaaatccacaccctttcccgcaaaaaagaccggatatttcccgcagcactgctctgcattctgcaatgccgcgggattacccagcctttttcatccatttactatctttatctgtccagccttttttccaatccggccatcatcaaccgctcctgctttatctcaaggtttctccccgcttctcaatcctcctcatctctcaaactgctctcgtagcctccgccagccatactctctcatcctcatccaaataagggctaatcttctcatacacctgctcatggtaccggttcagcagctctacatcccgctcagacataatctccctgtcaattacctccaagtcaatgggaacgtacgtcagatactcaaaccgcaggaactggccgtattcattcttctcatcctcaacacacaaaaccagattctcggtcctgattccatggcttccctcaatatacacaccaggttcatccgatgtaatcatacccgcttccatcaccgcattgtcctggcgctccggaaccattttgaagcggattccattgggacgttcatgtacgctggacaggtagctcaccccgtgtccggtaccgtgttcatagttaagcccccgtctccacagcggctctctggccgcataatcaaggctgagtccgcggcagccatgaagaaacttcacatctcccagacgcagcatactcataagcaccaaggtaaaatgctccttttcctcatcagtcacaggccccatggcaatggttctggtaatgtcggtggtcccttcataatactggccgccggaatcaatgagatacagtcccctgggctccagagggatgctgctctccggtgtggcagagtaatggcacatggctccatgtgctccatatgcggatatggttgcaaagctcaggccaatgcatccctcctggtccatgcgcagcttcccaagataatccgacacgctgatttcgtccatgggaatacgccccgtattcttcttcagccagtaaataaacttggtcattgccacgccgtccttgatgtgggcccgcttttcattctctatctccacatcatttttaaccgccttcatggaagcagtgggatttatcctgtcgatcaccttattggacccgtcaatcaggcggtatacagcatagttgatacggcatttctccagcaggactttctcgtttttaagcccctccaccatgtcgtataccccgtcataaggcatcactgtgacgcccgtccgttccagatactccctcacgcttatgcccttttcatcctccagatacggataagcttttccttccagcacactgctgttgacaaacagatacagttggtccatggtcaccagagcgtacgacagcaccacgggattatacagaatgtcattgcctctgatatttaacagccacgctatatcatccagggaggtaagcacgtgaacagatgcatgtaccttttccatagcctccctcacatccgcgatcttatccaatgcgctctttcccgcatacctctcatccagaacccatgcaggttccgccgacagctcaggccgttcctgccatatcatgcctgccaggtcttccccgtaggaaatacgcgctccccgctccctaagcatttcctccaaagcaagcccttcagccgcattgactacccggccgtcaaatcccaggcatccgccctcaggcatcttaccttccagatatgctcccagtgaggggacgccctcctgccccattttcatcatggtcactgtggaatcctttaactgggccgctgcctgtacatagtaacgcccgtctacccaaaggcatgcttcgtccattgtaatcagagccgtaccggccgagccggtaaatccggtcatatattccctgcatttgaaatgctctcccacatattcggattcgtggaaatctgccgtgggtatcatatacgcatccatgccccgctccttcatcaatttccgcaatgcatccaacctgtcccgaatcacattcataacatttccatccttccgtttcattctatcctttccttctaacccttttccttctaacccttttccttctaaccccttttcttctaatccctattccactacctctattccactccccctgtctcaccaatccctgtcccaccaatccttctatctcaaatcaccaacttatcatccgtctccctgcacttatttcttcctcatggcatcctctatggccgccccaataccttcattgtacgtaggctgtgcccgcatggcaaaagacatttcctctgcgctcagtccattggctatggccgtggctatttccccaatcatatccgtagccctggggcacatcatctgtgctcccacgatggtatttgaatatgcctcaaataccagacggataaatccattttccccaccggttatgatagattttccattttccctcatggaaaaatgaccgcagcgcaccttcagccccttttccctggcaatttcctccgtgatgccgacagtggcaatctccgggtccgtatagatacagtttggcacaatcggaagggacacatacataccgttaggcactacctccagcttaatgctgtggggccttccggctatcttttccaccacatatgtaccctgggccgctgccacgtgggccagctgtgtcctggcggacacatccccgatggcgtagattccccgctcgcttgtctcaaaatcgctgtttacggcaatcttcccgccttccatctccagagaaatatccttgcctaaaagcttctccacattgggccggcgtccgatggccatgagtatctggcctgccctcattttgatgggttctccctccccgttgggagtgatgacgcagcttagcccgccctcatcctccaatatctcagtaaccgtggcatcacagtacacgtcaatacccttttggcgcagctctttttccagctccgcggacatcacatcatccataggcgccatcagatgcttctgcttctccacaatcgtcacatgggaacacaggttgttgaacatggtggcaaactccaccgcgataacgcctccgcccatgattgtcagcctgtcaaaattccagctctcagctgccagcagcctgtcactgttccatacgcccgtaaggtccgcgccgggaatccggctcatgtagggcactgcgcctgtagctataatgacagcatttccgcggaagaattcgcggccgccttcctttagctccacctccacggtcctgtccctgcgaagcaccgctgttccgtaaacaatttccacattcagcttctcaaagccgtacttaatgccgtccctgtatttgaccaccgcacttttcttatacttctgcattttcccaaaatcaaaggaaataaaatccgtggacacgccaaattcatcgcagctctgcatcatatgaaacatatcagaggcgtgaagcagcgccttggttggaatgcatcctctgtttacgcatgtgcctccaatcttctttgcctctatcaccacaaccttaaggccaaattccgctgctttaagcgctgccgtatagccccctggcccggctcctataatcactacgtcaaattctcttgccatacccgttctcccttatgttcttataaattattcttttaaattatcatgattacattatatttcaattaatttcttccaagcatttcttcaaagaaggtaagcctaaatcagccccaaatgcctgcatgccttccataccccgtcccggtcaatatcatctgccacgtaatccgccacagccttaagctcctccacggaattgcccatggcaatgccgatacctgcctcacggacaatttcatagtcattcatgctgtctccaaaggccactgtctgctccaggccaatgtcatagtactggcatagccgtttcagcccctctgccttggaagcctcctgctccaccacatccgcccccatgttcccggagaacataggaaatttgaattcaggaaaatgggcttccagctccctggcgccttccggaccgccgatataaaccaatgtcctcaccggcatatccaacaattcccatccatccatgaaattgcgctccgaaacaccccagcgaagccggtccatgcggaccacgccctccgggtggatataataatcctttccctcctggctgacgcccagggaaattccgtgggcatccccgtattccagcaatgcccggagcctttccttgtccatcagatgttcaaacaggacatttccctctgccacaacccgcgttccgttcatgtgtatcaccgcgtccggcataatcatatcccggtataccacactcatatcatggtccatgtttctgccgcttcctatggcaatgaccgagtccttccgcagcagttccagtgctttcatggcgctgtccggaattttccaggtcttatggtccagcagtgtcatatccagatcaaagctgacaatccgctttttcttacttggtttctgtgtcatttttaaattctccgaataaattaaaattaggtcttttcaaaatgaaaattatctgatataataattgaggttcgagaacggagtatggcgtagcttggtagcgcgctcggctgggggccgagaggtcgcaggttcaaatcctgttactccgattcacttgttatatgtcagaatctttatcttataaggattctggcatttttttgtaccctgtacccgcaggcttccatctgaatccaaaccatatcttaagaatatcctcacccaaactccgagcaaaacatttccatatacatccggtgcacaaattcctgcgcaatcctctgaaaaaaagccgttttgtcccggcgtactgccgtacagcgttttctttcatcaacgtgattaacagcagcaccgtgtcccgattgattataccacgttctgctaaattattccatccattttctatgagcgtgagcgttgactcctgcgctgattcctgcgctgacttctcataatcagggaataagcatgaccgttgaaggatcaggcttattgctgccccggaaatggaaatgaataaacaggaggtaatcaaaacacaggaggatactatcagaattccgataaaatacaacgatgaactgaaaaagatagtaagatatgatttttaagccttgacagaataacaaatatatgaaccttttcttcaagcatgccggccctctcaatggatggacgcagctcaatagaaaatcagataatgggggaatgtgctgcctgactcagcagaaacaaatccattggctctaaacagaatctgagctgccgcagctcaacatcatgccgcagcagctcagattccgcttatattatgcgtttattatgcattcccttaatcagctatcctttttacctttcgcgtcagcaacccgctcagccaatcctctctctggatcacgaacacagacaccaggataagaagcatccctcccaccttagccatggtaatctcctcggacaggagcagggcgcttaagaggattcccaccaccggattgatgtaggcatacgtggaaacaacagaggttttccacctgcgcagcagatacagataggaggtcaaccctacaatggaatctgcaattcccatatatgccatgggaagagcgccgcgccacgataacttccccaggtcaaaatttccggtcaaaactgcacagaaaaaaaacaggattgcgggaatcgcggactggtaaaaaatctgcacctgtacggaggcgctaattgactgatatttcagatagacggttcccaccgaccacacgatatcagcaagcagcagcagcgcgattccaatagggtcggcatttccgccggaaacactgcccaccaccaccacagcgataccggcaaaccctccgataatccccccaatccccacccagctgacgcacagtttacgggcggcaagggagtccaccagcaaaatcgtaatgggaatcaggctgaccataaccgtgcttattcccgcatccacacgccgggaggcgaataaaagcagcaccgtgttcaaaaaatacataaggacacttcccactgccagggtctttccgtcacgtaagccgacagcaagggactcatgccgaaagcccacccacagcgccatcaatacagacgcaatcagaaaacgcaggctgccggcaaaaaacggatgaatcatgctggaggacagcttatttgccacgccggccgtcccccagaaaaaacagatgttaaaataggcggcaaagggaagcagcctgcgcagagaagaatcgcttttcatatttgttccctctaaaaccgccgaaagaaccgctaggtcgtccaccccatgggtgtcatcacgcagaaaccgattgcaggtgtttcacctgtatttatggttctgtgaggcatgttgggcctcaccaccagtgaatcaccggcattcagatgataacttgtctctcccagtaccatatcggcttccccctgcagcagaatgacaatttcctcagatgggtgagtcaaaaattcttcggagtcatggccgcccggttcaatctgaaattgaatcaccatggatgacggtgtgtattccggtgctgacatcggagaaacaatctcgtaaaatatctcacttttgggaaacttgataattggtctctggtcgctctttaccatggcaggatgatgttccgactggtccaccagcaaatacggtgaaacccccagaaactcactcactttgcggagagaggacagggacggttcaaccgctccgcgttccaactgggaaatgtatccaatggaaagtcctgtggcctctgcaatatccttcagcgtcagttttttttcttttcttaattttctaattttttctccaaccataatgcaacctctactagaattcgttgagcgacggcaattccccaagaacctgttatacaaacaagtattgtcccatagcaaatgcgtctttcacaggccaggacagataacgtctccacatgccatagcttatcttaccatatttccgaaaactccgacagtatctgactgcaaattttagcaaaaaggattatcgctggagtcacgttcttctttttgaatagaaaaacggagctatcaatcatattcccattaaaacagctgctgacaaaatcagtgcctgcgcaatatataggatgccgaacaggggcatgaaaaacttccaccacttgtgcattggaattccgctgataccgatggaaatggcaagggaacatgtgggccacagaatattggagaaaccgtcgccgaactggaatgcaaggcaggttacctgccggctgactcccagcagatctcccagaggcgccagaatcggaatcacagtggcagcctgtccggtggaggagggaataaagaagttaatcaatgtctgcagaatcagcattccctgagctgcaatgattggcggcattccctgaagcacctgggaggcgtaaaacacgattgtatcaatgatcatggcgccctgaaggatgaccaggattgcctttgcaaatcccacaaccagagcccccatcacaaccgaggatgcgccttcaagaaattcttcagccatcttgcttggtccccatccgctgaccgtgcctgcaaatatgcccatcagcacaaagatgccggccagttccgcgttgccccatcccaatttcagagagccgtagaaaatggctatcagggatacgaggatttccagaagaatccacatctgctttttcgtggtctttgtgtttatgatttcctcacggttaaagttaatatccagcttatccccaagaatcagactcttagaaggatttttgctcactttctgtccatagtagaaaatataagcaattcccagtgtactgaaaatcacaaaggataccacacggattcccattcccgaaaagatgggaactcctgcgattccctgagatacgggtactgaaaacggattgagcgtggcggcagaccagccaatccccttgcccagctccagtatggcaaatcctgccagggcatcatagcccagcgccacaccaagccccataaacacgggaatcaatccattatactcattccacataccaaaggtcgaagaaagtacagcaaatgtcaggaaaaaaaccgggattaccagctttgccctggacgagaatcttcgcagcagagaaccgagaaatgcgttaaatgcgccggttttaagcaccatgctaaaagcaccgttaacaaggaatatcagcatggttacttccgcaccgctgacaaggcccctgtggagagaactcagaatggtcaccagtccggccggatgtttttcctcaagggtgtggaaggtgccgggaataaccagtgtacggcttactccctccacttccactgtctgggtatcaaactggcccggcggaacaaaccaggtacagactgccacaaacagaatgatagcgcagataataacatagacatgcggtattttaatgggcttgcgtgctgtggccgcagttccgccattggtgtgtacatttttattcttttgcatatacattgctccttaatcgaacatattcgttgtgatgtgtcagttccaattcgccctcagtacgcgcagcagatttttgccggtcagttttgcaatatcttcctctgagtaaccacgccgtttcatttcatctatcacgttttccaactgccagcagccttcaaatcctttggcatggcgttcatccgaccgggtgcccacgcagctgttatacgcccctaccactgccggataaagcacagcctggtctgcggttcccttgtcatccttattaccatccagggtattgtcagcgccgaacgacacatggtcaataccaataagattgaccacataatccacatggtctacataatctctcacatccggacggcagcccttctcttttttccaaatcaggggagcccagggggaaattcccatgacaccgccgttttccttgatagcaagcatttcctcatcggttttggtgcgtacgctgggtgtgatgttataaacaccggcatgggtaacggcaacaggcttttcacttagccggataatatccatggtggtctttttacccacatgagacagatcggccagcatgcccagacggttcatcatcttaaggacccgtttgccaaagtcagtcagtccgccgtcctgagactcgcagcagcccgtgcctatgaagttagcatcattataagtcatctggatcacccgcactcccaattcataaaaaacgcggagctgctccagtgaattctcgattgagtttggattctggaacgctaaaataagagcctttttcccatcttcctttgctttatagatatcggctacagactttgcaatcatgaggccatatttcgggttgtccagcatattgtatatcttaccaatactcctggtgctggcaacatacccattcccctccccgggaatggtcagaaaaaacgcgtccattttagaatgcagtacatcctcggtgacacccgtaaattcggtctcggtaaacgcgcaaccatcaatgattaaatcttctttcattttttacctccactaaaattttatttaacaaaagtataattcggtcttgttcgcaacctcatccaggcttttgttcatgccataagagtatcatatatacatgttatttacaagacagttcttccacataatcacaaattctatgactatatcaattttttattgtatattttgtatacttttcacaagaattgttttttaaaggctctctccttgactttatactgtcttgaatataaaatgaaataaaattatagtataatttcaaaatcggagggaatattatgagccaagctatccaaaaacgtatcgcatatattggcgcaggccagatgtgcgaagcaatttttagtggtcttatcagttccggagccattttaccggagcatatcctgttgtatgatgtaaatgaatcacggcttacagacctgcaaacccgttaccgcacaaacatcctcacgccttccgcccattcctatgaagatttggtatcatgggcagatattgtgtttttgtcggtacgcccccaggatgccagagaaacactctctaaagcaggcatgctcttccggccggatcagactgtaatttcaatcatgggcggggtaaaactctcctttttagaagagtatatcaaaaacgcggcagtggtacgggtgatgcccaatacacctatgctggtaatggaaggtgccgcgggtattgccctgggcgcccgctgcacttcccaaacagaggagttggtaacctcaatttttaatgtaatcggaagcagctatgtattgcctgaatcactaatcgatccattgaccggaatcagcgggtgcggtcctgcatttgcatatctctttattgaatccctggctgacggcggtgtggagatgggactcagccgtgacgtagcactgaacctggcagcccagtgtctcattggagccggtaaaatggtactaaagacaaatacacatcccggtattctcaaagaccgggtatgttcccccggaggcggcacaatagccggcgtacataccctggaagaaggaaaattccgcggcgttgtgatggatgcagtggtagaaagcatccggcggatgcagaatgtgggggataaagcttaagagcaggacctccctcctattttatccacaatcattcttccttcaattcagttatacacaacaccagacctggtattttcagacgatttacatgaaatatctagtgttttcggtggataatgtggataactttgtggatatcctgttaatcttctgttgatgccatgtggatgttcttttgcccgcacgctaagagggccgtacaccttgggttgggtgtacggccctccttcttattccagcaaatcctcataagaggttcccaaagctgctttaatggctttcagctgagaaacctttatatgctgcgtccctttttcaattttcaccaatgcctctcttgtaatgtctgcccccatcagctgcaggatacggaccagatccgtctggccgatgtcagattccagcctgattctgcgtatgttggcaccgatattggttcctttatcattttttatcacatccattacccttcccccgtacgcataattccattccataaactcacttcatgaacccatttcagtccatttcacccttcatattatggagattttatgttataatgggaccaaaaccagtccatcatttaaagaattcaatgaggtgaccctatggaacagtatgactttacagacaccggcaatgccaaagatatctacggattactggattgcatgtcggaaaaggaactggagatggccagggaggcggttcgaaacatccgtgaaaccgcgcagctggcccaattcgagcggtacaatgcgtggttcgaccacacccttctccccatcttcaaggaatatgcccagatgacctcttccctgctgcagattgagcgggataacgggaccatcgacgtcctattccgcaacagcggcggtctggacatcacagagaactgtaaggggatgtatatggcgctcatgatagctgtacatatattcatggattcagacgccggagacgcggttctggccctgacctatgactgctgcaggattgtatcatgaaatgatgcccgctcatcctgccgcccggccaccatccgctccatatccgccttaaagcactgcactggatactgatacccctcatatccagccatccggcagcgttcccggttcacctcataacagtggaccggctggaacagctgccccttctttaccagggccgggattttccacagacagttgtccatctggttaagcccggtcacagaacgcctgccatgggtctttgtgacccggatcccccctgcctgctccagataggcatggttttcttccctgccgtatccctccgactccatggcctgctccagtccttccagaaaatgctcccggtaatgattccatgcactgccgtccattccgcacagcaccactgcaaaacggttgccggcattgaccgccgcctactttaacagctcatcataggtcgtctccagtatgaccttgatggcctttagctgggatactttgatatgctggatgccccgctctattttcaccagggcctccctggtaagatttacctcaaagtcccactcttccaggtcaatcttctgaatcagctctgtctgtccaatccctttttcctttcggattctgcggatattcattcctatattcgtattctcatcgtttttaattatatccattcttccaccctgaatatctggactgattttagtcctttttgctcttaatcttattcaaaatctatgatataatgggaccagtatcagtccaaatggaggtcaacccgctatgccagtttgcttttttgcctgtgacgacacatctgtcctttactgtaatgatgactgcctgaaatttttccgggagcaggttcccgggacggaatcacctgcggcagcccaaaaggctgcaagccgctttccgggataccaggtatttcctctcggaccatacacctgctgcatgtttacattttcccggaccgcctctgcctccgggttttcccagggtaatgacaggctgcctgtaatatatgaatccgtgctcaacgaggtggaggagggagttgtgatatcagaccatgagaacagggtcatattcatcaaccgcgcggcagaggccattgaaggcgtggatgcccggatgtccctgggcaaacgcatggaggagctctatctccctgtgggaaacggaaaaaagaagaacagccatgccgctgtcctaaacacaggcatcgctcccaacgaacacctaaaccaatatgttgtaaagtcatcacacaagataatgaatgtggtggaacgcatgtatccggtcaatatccatggccgcaccatggctgtgttctccctgattaagaacctgcctgtcatacagaagtccatggaacagagcctggagctctatgattatttcagggaaaacactccccacaacggtacccgctataccttccggagcattgtgggcagcgatatacggtttgtggaggcaatctcggacgccaagtgcgtagcccggaaccagaccaccgtgctcatatacggcgagacagggaccggaaaggaattatttgcccagagcattcacaacgcaagcccctatcagaacggcccctttatcccggtcaactgcgccgccataccttccaccttgctggaaagtatgtttttcggcacggtaaaaggctcctatacaggcgccgtcaacaccaccggactctttgaacaggcccggaacggcactctgttcctggatgaaatcaacagcatggacatctccctgcaggcaaagcttttaaaggtcatagaaaataaaaccgtgcggcgtatcggagacatgaaggagcgggaaatccggtgccgtattctatgtgccttaaacgaagcccccctggcatgtatagagaacggaaagctgcgccgggacctgtattaccgcctgtcctcctgtattctgtatataccacccctgcgggaacgaaaaagtgacattcctctgctgtgcagcttttttctcaagcatttcaataaggaatacggccgtcatatccacaggatagatcctgaactgatggatcgttttctggaatacccctggcctggtaatgtccgtgagctccagcatgtggtggaaagcgcattctctgtctcccgaaaggatatggagattttgcagcttggtcatctctcccactattacagggaattttttactgcctgcaaaccggaagctgtttccggcagccaggccgccccaggccccgtttctccccgcaacctgcagcccctgaaagcctacatggattcctgtgagaagaatttcctggcagcggccctgtgctgccacagcaacaatatcacggcaaccgcccgctccctccagattacccggcaggcgctccagcacaaaatcaggaaatatggattatagcgtataatatcctggcagtgacaattttatttgcgccaaaattatttacaggtccctcctgattttcctgttttatccatattccgccccaaaagcaccctttaagcctcataaaagcgttcttttaccgatgtccctcattctggcatataatttgcttttaatattactgtacatgtacagaagggggaactgcggacctgcatcctgcagcctgcacaattcccgaaattttataaaataagggggactgaaaatggaaaacaagaaactgaccatgagggaaatgatctgctacggtatcggagacatcaccgccaacgtgtatcttcagttcatcgccctgtttgccatcgtgttctacaccgatgtgctgggtatctccgccaccctggccggcctgattttcatgggaagccgggtctttgacggcatcaacgacattgcggtgggttacatctctgaccggtacggtcactataagcgctggattctatacggctctattgccacggccgtggcctttgtcatcatgttcacaaattttcatctgagcacgaaaatgcagtctgtatacgccctggccgctttctgcttctggactttgatgtatacgtgctatgcgattccttttaacgcctttgcgtctaccatgacgcagaatacagaggaacggactctcctcaattctatccgctttgccattgtggcggttccgtccctgattatatccctcgccacgccttacctgaaaagcggcacacaggaaagcaacagcacctatggcaatatcgcgctggtattcgcagtcattgcgaccgtctgcaccttaatctgcgttgccggtatcgtggagcatgccaaggcccccactgccagacagcgcacctcgggcaaagaatattttaaggccatcctcaaaaaccgccagctcctggtggtcagcgcggccttcttctgcaggacacttggatattatatttactcctcgtccatggcttattatttcaattactacctgggctctgccaagctgatgggaattatcctgggcatatcggcccccatctccgcggtggcggctctctgcgtgactcctgtgtccaggtacatgggcaagaaaaaggccctgatgggctgcggcgttatctttgccctgtccagcgtcatccgttattttatgcctttaaacacagccgtggtggcagtcacctgctggattggcatgttcgtcatgagcgctaccctggccatcttctttaccatgatagcagacaccaccgattacggcatgtggctcacgggcaagaatgtaagggctgtaaactatggtttctacaccttctgccagaagattggaatggcattctccggcaccattgtaggaatcctgctggacatggccggctatgttcccaatcagcagcagacagacgccgcactgcggggcatcctcaatatatactgcctgataccggctgccatctatctcatcatgacggccttcatgctgctatggaaattggatgaaggcaggatgcatgaaattgtggccgagctggaggtaaggaggcgcctggaaaccaatgactaagcagatccgcaaaggatatggaactgtcatcctggcatcgttggcatatggtgtaatgccggtggtatccaagctattgcttttgtcgggaatgaactcagagagtgtcgtgttctaccgtttttttctcacatgtttgttctcggctctgattctggctgcttttaggggatttagggccgtgacccttccacaggcggttttgctggcgctcttcggcatactgggcttcggttttaccatgcagtttctgaccatctcctaccagtatattcccattggactggccaccgtgctgcatttcgcctaccccctgttcgtaacccttatcatgctggctgtttacggtgaaaagccagctcctgccaggctgtggggatgcgctgccgccctggcaggcatatgcctgatggtggatctaaaaggcggtttctccccgggcggcgttatatatgccctgctgtccgccgtcacctactccgccttcgtagtctccaacaaaaaggcctgttatggcagtctgagtcctatgctctgtctcttcgcgttcagtctgtcagccagtctgttcttcggactgagctgtactcttacaggcacactgcaggctccctgctccctataccagtggggatgcctgatggctgtcagccttctgtgcacggtctttgcattctgtacccttatgaccggcgtacggattctgggagctgcgaaagcatccgtcatcaacatgctggagcctgcaaccggagtggtgtttggcgtcatactatttaaagaaaaactgtcgttaaaaataatgattggctgtgcctgcatactggtatccaccctgattacggtcctggccagggacagccgcaaagatggaggcaagaaaatatgaatgaattattgtcatgtgataccatggtcgcccttgggaacactacaaagtccggcaatgtaatatttgccaaaaacagcgaccggcccctgggggaatcccagcccctttgcctgtttgaggctaaggactacccggaccaggagctgttatcatgcacctacatatccattccccaggtgagccgcacctataaggttctgggctcaaagccttactggatatggggatttgaacacggcatgaacgagtggggcgtagccattggaaatgaagccgtgtggtcccgtgaggaggaggaacgcgaaaacggccttctgggcatggacctggtacgcctgggactggaacggtccaaaaccgcatatgaggccctccacgtgatcacagaccttcttaaaacctacggacagggcggcaacgcctctgtgaccatggatttccgctaccacaattcgttcctgattgccgatacctgtgaagcctggattctggacacggttaacagacgctgggttgccagacgggttaaaaatgcggagggcatatccaactgctacagcacgggagaacactgggatgaggactccggagacatccaggaacatgcctatgaaatgggctacgcggacataggacagacctttgactttgccagggcttacggcgccgtaaacctcaaactgcgcgcagcctatccccgctataaaaggcttaaccagctcctggacaggaaaaaaggcatcctgacgccggactacatgggaagtatactgaaggaccattttgaaggcgaaatcattgagccccgctggagtcccgcagacggaatcctggcatctgtctgcatgcacaatatggatgaatcctccagcaaaaccgctgccggttccgtggtggaactgtcaaaggataaaacgcctgtctggtggagctgtatgtccaatccctgtatctcggttttcctgccttttaccatggaaaccgccattcctcagaaggtgtcccagggcagcgcccggtacagcgatgattccctttggtggaaattagaacggctctcctatgagctggaagaggactatccccgcaacaccgccctctggaatcctgtaaaggaaaggctgcaggagtacatctgttccctggaggaaaaagggctggacgacagccttctctgtgagatggcttccaggctggaagaagcagcggatgaaatgtatcttgtgctgcgtgacgccaatgcctccagcagccagccccagagaaaggcagcgctgaaagcagcacgcaccatggccggcattatataaccgccgcctctgccgtataaccgcctatagggcgcatcttccgggaaatcagtttacaagagactatacgcagaccgtgggctgctgacaaaagatgacaaaaaaataacaggccgggtctccgcaccaaagggtgcggtccccagcctgttttcttatcttatcattctgttgggttttccgtttccaggcgtcctcatcctgcctacttgtacagcgacagaccgtctatcagtataatgggatcatcccactcattatccgtaaccagagaaacctccacgcggatctcattctgtcctgtcacatccacgccaaaatacatcagcttttcattgtaatggatatcctgtgatgtatagagtacagtatcattgtcaccgtatacagttaccttcgccatgattccgctgctgaactgggatgatggagctatgacgccggataaaagcctgtactgtccgttggcagcatattttacatagcttccctttcctttcagacggatggcattattccagcgctcgccggtggatgttttgcccgatgtaatgatattgtatcccttggtggaaaggccgtccaacaggttctgcaccagatatggcgtggacaggtctgtaatattggccggttccacctctccctccgctgcaatccatacgccgtccgcaccaagctggcgtccgtcaatcactgtgttcgtggccatggctccgtttggaagcaggaagtaccatttgtcgttatccttaaaccagcccttctgcatgacccctgcctggtccatgtaataccactggccgtcaatctgctgccagcctgtggtcatgacaccgttgttatccatatagtaccagttgccgttatcctcaatccattccttgtaggcaaacttattggcgcctctctgatacttccactgatcattcacgtatttccatgtacctgcataggccggaaccgacataaccacactcagagccactgctgccaatgtaaccgccaaacgtttcttcattctgaatctcctttcattctcccctgactgccctgtcacagacagatattattcatcctgcacttgttacattataattcattctttatttttatgcaactgtgtgttcaaactgtaattaaactgtaaagattaaatacttccaggaaataccttgacaaatcaatctgtaagtattatagttacagtataaaatgtatcttttagaattacagttattacctgtctgttaacagcatcgagaaaggagcttacctatgaacacccgcgaacacacagccatgaagatgagaggaaacccggatatctcctatctgggacataccgttgatcagatgatttggagctttatggaacaggaaaaaattgacggacttaccttagccattgtacaagccccctacataccaagggtagccggatacggctattcggacagccagcggcggcgcctggcttcccccaacaccatgtggcccgccggccctatctcccaggcctttgcggcagtggccgttatgcagcttcatgaggacggcggactggatgtaaaccgccgggcttccgtatatataccggaacttcctgatacatggaatgacatcaccgttcttcagcttctgcgccatgcatcgggactgccggattaccgccgggcggctgaattcagcccggacacaccgtggacatttgatgccctgctccaattggctgccaggaatcccctgcactttgttcctggtacagaggtggagcagagcgctaccaatttcctgctgctgaccgaaatcgtcgaacgggtcagcggcctaagttaccacgattttgtaaccaaaaggcagattgagttcctgggccttgggcacacgggcttcaaggaggatttaggccagttccatcacgaagacatatcccggaccgctgatatccaccagttattcaaaaaggacagactctatatcaatcccacggagccagccgtatcctatgacagcagcggtactcccatcacggcggcagaaactacggcgctccggggcttttccgatatttgggcctctgcccaggatatttccttctgggacatcggcctggccggctctgtcctgattcatcagccggaaaaccgcgcccttatatatgctccctggaatcttcccgacgggaggacagtacctgccgcatccggctggcagttttaccatcaccggggacttatggatataaagggatccgtccatggctattcttccttcctgagccgcttcacagacgcctccgagctggtctgcgtcaccctcatgtgcaacaaggaaggggtggacttcaccaatctggggcgcaggatagccggcgcatacggcgaccttctgtccaccgggtacgatgacaaccgtctctatcttctggaaggccagttccctgcggcagaaacagtatcacgcctggaatcagccttaaaagaccgcggtatccctgtatttgccaaatttgaccatggacagaacgctgccggtgcagggcttttcctccgtcccaccacagtactggtattcggctctccccaggtaggcaccggactcatggaagaagatcagagcgtatccttggaactgcccctgcgcatcagtgtatgggaggatgaagccggaagcacatggctggccttcccacgcctggacaaggtattcggtgaatacggactggaaaaccatcccgctgtccccaagatgcagaaccttcttgaacagctggtgcatataggaggcagcatctattaaccagaaaaccacaccgcaaaaaccaacccataaaaaggcaccgctccccgcaatccgggaacggtgccttctcacattctgcctttattcttatatatacactccagggctgttcagacagcaccagacatcaggtattcttcatgataacgctttccaccacatctgccacatgctcgcaggcatcgcagcatttctctaagtatacgtaaatctccctccaggcaatgatttcaatgggatcggtcacctcggcgtgaagcctgcgcatggactcaatgaacagccggtcgccttcctcctccagagcgttaatctcgatgatcaggccgtgaagtgtcttggatttcctgaagtccgcaaactcctccataacctccttaagcgcctcgcagcagcggatgatgacctttatgaaggcaagggcctcgggacggatttgctgaacattgtttatgtaaatacgaatcagtacatcctcaatcttgtccgtcacctcgtcgatactctggctcaaaagaataatatcctcccgctcaatgggggtgataaacgccttgaccagcacagccatcatctcatgctttttcttgtccgcgtcatgttcaatccggtgcagctcgtccagcttgtcctgtaaaagccctgtatcaaaatggtttaaattatcctccagcattttggctgcctggcatccgcactcaacgcactctatgaaattctgaaaatagtaactatcacttttcttagacatcttatcttctcctttacttatccgtggaacaacatcataaacagcttcgctatcaggaatccgatgatgccgcagccggggaatgtcatgacccaggtcatcaccatgtccttaaccacgctgaagttaatggccgacagacgtttcaccgctcccacacccataatggctgtggtctttgtatgtgtggtactgacgggaataccgaaaatggaaaatccaagaagacaggcagctcccgccatatccgcggaaaaaccctggtatttctccagccgtaccatatccatgcccacggatttgatgattttctttcctccgatggacgttcccagggccatggctgcggatcccagcaaaagcatccacagagggaactgtactccctgggtattgctggacccgttgaccatacagatacctaacagcatgactcccatgaatttctgtccgtcctgtgcaccgtgcataaatgccatggcggcagctccgccaatctgggcataccggaaaaatccggtggttttccggcggtccatatcccggcaggtccaggccaccagcttgcatgaaagataaccgcttaaaaatcccaatacaacggaaaaaatcagaccatagaccaccttcatccactctgccgagttaatggccgaaaatcctccgcggatagccacggcagcgccggtaaggccagctatgagcgcatggctctcgctggtgggacatccaatggaaacagcaaaggacgaccagaccacaatggaaaaaagcgcggcacacagggcaaccagagcaattgaagtatcttccccgaaattgaccatattggtaatggtcatggcaaccgtggaattcaccatggtcatcacaaccacccctgcgcagttgcatactgccgccataacaatggccagattcacatccagcgatctggttgacacgcaggtggcaatggcatttggcgcatccgtgataccattgacacagatgaccccaagagtcagaaggactgtaatcaacaatgccggatttgtcaccagctgccgcaggaaaaaggaaaacgacatgtccataattcttttttacctactctcttaattatttactttatctttacgtaaaatttacaaactcacgattttaattctaacacggttttttatggtagtaaagttcaatttcgttaagaaacaaaggaaaatattcgtttttggataatagaaatgttatgggataaaatggaaaacgcctgtattatctatatatagataatacaggcgaagcagacaggacaaatatggtttcatactctttgtacactctcagcagaaacatactccaattattgataatgttttgtccttcatttgtatattcggtttttattggaactctggttttttattggacttccggtccgttcagccctgcatccatgctcccggaacggaacccttctgcatccagggttatatacacaaaccccatttccttcaaacggctgacgatttctttccggcctttcataaatacctcaaaggcttccggatccagttccaggcgcacgatatctccgtgaagcctgagacgtacattgccgggaaccatagtcctgacataggcttctccctccccaattcttctcagcacctcatagtccagagcagcgccgtagggcaggcgggtagccatgcagggagtggacggacgggatgccaccgatattccgtactctgacgccagggcctttacctgagccttggttatgtgcagctctgccaggggactaatgattcccagctccttaagcgcccggattccggggcggtatacatgcatatcgtcctcatttgtaccgtccaggatatacctgattcccctggcctctgccagctctgccagtctggagaacagatggcgcttacacagataacagcggtttaccgggttgttttttattgactcctgctccagctcatccacggtaataacctcatggattcctcccagctcccctgccacgcgcctggcaatctccaggtcgcaggaaggatgcaggcggctgtcaaacgtaacggcgtacacctttcttcccgtatgggcggctgcgtctgctgctgtctttaaaagcaggcttgaatcaactccgccggaaaatgcaaggcatatatcctctttggccagctgctccatcctggcctccagacactttttcatctggtccggagatgacatttcatcactgaaactgttatttaccgtattcatacgaatctcctaatctgacattatccatacatttaatcctgccggctttcctctgccttcatacgtgcctgatgatatgcggtctgaaaatccacaccctgttccctacaaatccgccggatgctttcatattccggataaaaaaacgttctgcccttgtaagcacacaccttcacatctgccggcccgtaactggtttccacctggatttcactccgatcaagaatggtcctctccgtcggataacggcggattccaatggtagtggtctgggtaagaatgatttcctccatggcctctatggatgattcacggcaaagcacagacagcatgtaggcgggacggtttttcttcatgtgaataggggtataccacacatccgcggccccggcatcaaggagcatctccatggcaaggcccagcatttccccggtacagtcatccaggttcgtctccaatacccacatggtacggtcctcttcctgtgaagtctccagcagcatggcccgaagcacattcgcctgtttaaacaccttgttccccgcacccattccgaccttaagcagacggcaggaagaaggcagccggtcctttgtccgcagagcggcggcaattgctgccccggtaggtgtaaccatttccccgtcattgtctgtaaaatgcagcttaagtccataggaggaagcaatattagcagtagccggaacaggaaccggcagtacgccgtgctggcagtggacatggccgtgaccttcagacaatgcagaaaccaccacatcctccacacccagattgtcgatacagactgccgcactgataatgtccactatagaatcaatggcccccacttcgtggaaatgaacctgttcaacaggaagcccatgggccttggattccgcctctgccacaatgcggaacatggtccgggccatttccttcaccctctcattggaatccagacggtctatgatatgataaatgtcgtggaggttcctgtgaatgtggggatgcggatgaccgtgaccagcctcatgactgtgctcatgctcatgaccgtgatcagcctcatgactgtgctcatgctcatgaccgtgaccaacctcatgaccgtgaccagcctcatgccggtgaccatcctcatgaccgtgctcatgctcatggccgtgaccatcttcatgccggtgaccttcctcatgccagtggccttcctcatgaccgtggccttcctcatgaccatgctcatgctcctccaaatgcacatcaaaatcaaatgcatccagaccgctcacaaccttccgtccaaaatgcagatggtatccatccactcccaggctctccagcgcattctccagcacctgcctgtccgctcccagatcaagcagggctcctaccgtcatatccccgctgatgcccgaattacattccagatataaaatcttccccattttatctcaccgccattctgtttatttgggtcgccaggtagccggcgccgtatccattgtcaatattaaccaccgatatcccgttggcacaggaattaagcattgtaagaagggccgacagcccgtggaagctggctccgtatcccacggaggtggggactgccactacagggcattccaccaggcctgctatcaccgtgcccagcgctccttccattccggccactgccacaatgcagctggccttgtccagacgttccctctgggccaggagcctgtggattccggcaactcccacatcaaatatacggtctaccctgcatccgaaatattcagctgtctgggctgcttcctctgccaccggtatatccgccgtgcctcctgtgcacactgccacataccccttgcgctcctttcccggcttctccaccttaagtatccgggatatgggatcatacaccacctccggcaccgctgttctcaccagctcagcctgcttctcagaagccctggttcccagaacctccccgtccctctcataaaatttcttatatatttccagcaaatacgcatccggctttccctggcagaatacagtttccccaaaaccggatcgcagcttcctgtgatggtccagcttggcatatcccaaatcctcataaggcaggttcttaagctgcttctctgcttcttctatgttaacactgccggactttacctgctccagtaattccctgacatccatcttttgttctcctctctcaaatccatacggcttggccgtcccatttccaatccttccacatacaaatcatccggccgctccgtccctaatccgtccttaaatcaaccaccctgccgcaaacacgctccagcagctcctctgaatggctgaccaccagcaagcccaggtcccgcgtcttcacttcctccaaaaggaatccccagatctggctctgggtgataaggtccagcatggtgcttatctcatccgccagaatgaaccgggtgcgcttccccaatgccctggctatacagaaccgctgcagctctcctccggacagctcacccgtataccggttcagccagtccggttcaattcccagaccgcggaccacccgttcctccacaaaatccccttccctcagaacttcccgcatcttaaggcggggatttactgacagttccggatgctgccatatcatctgcaccggattgtaaccggcacaggaagaaatatttttcccgtctaacaccacagtcccatggtccggtttctcataaccagccagtatcttgcaaaaggtcgtctttccaaaaccgctgggagctgtcagccccacacgttccccgctctccaggcttatgctgacattgttcagtattttcctgttcccattgtcgtattggaaagaaatattcatagcttccagcttcatattcccgccttcctgcattttaccatgccgccgcgaaaactgcgataagaaatttcctggagacagccttcatccatgtccgggcagcggggcccatagggacatcccgcgggcatatccgccgcatagggctgggtcccggatgctgccttaaatccgtgacggggcatggcccggaatagagctttggtataggggtggcgaagcctttgctcatcctcaaaatcctctgccagggcctcctccacattggtacctgcgtaaaataccacgattctgtcagccacctccaaagccagctccaaatcatgggtgataagaaggacccctgccccctggtccgctatctcccggaagtgggacagcacacgcctggccgcgctgatatgaaggcccggcgtgggttcatctgcaataaccagtctgggatgctccatcacggctgtggaaataagtacccttctggtcattcccccggacagttcaaaaggatacagctcttccgtatcctctcccagcccgtagcgccccatggattggcggcagcgcttcacgctctccctgtctttttgtccccttcgtacctgttctcccaccttcataagcggatccagatacgacacgctctgggggaccaataccatccggctcccccgaagctgttcctttttcttctgggtcaggatttctccctcaaaggaaaccgtcccctgacaggcggcattctgcggcagaagtcccatgaccgcatgggccagcaggctctttcccgaaccgctggatccggctacggccaccacctcatgttcccgtacctttatgttcagatcccgaatcacgggaagctccctctggcgccatccccccacatactgggaaaatgagatcatcagatgctccaccgacaatatgacttgtttttcctccaaaacaacctcctacacaacaaacctctgccacggcacaggcgattttacagatgggcctgggccgggtccagcagacggctcagcgtatctccgataaaatggaacaggaccaccacaaataccagcaaaagcccgggaaacagggccagccaccacttccccatgaccaggtatttcatgctctcagacaggataacacccacggcaggctgctccggcggcagcccgaagcccagaaaggttatgctggcctcatgaagaattgcatggggaaacagcagaaccatgcccacaaaaagctggggcagcagatggggcgtcatatgtttgaaggcaatataaaaccttccctttcccagcttctttgcaatctgtatgtactggctctcacgaagctgtatgacctccccgcggagaagcctggccagggaagtccagtgagtcagtgaaatcccaatcagtacaccccagaatccctttcccactgcaaaggaaatgagaatcagaagcaggatatggggtattcccatgaccagatcaatgattcctcctatgacagcatccgtgaccctgcccagacaggcggccatggttcccaggatgaaagccaccaccgcgctgatgcatgccgtcaaaagcccgatgcgtatgctgatggatagccctgtaaggctgcggacaaacatgtcccgccccatccagtctgtcccaaagggataggccaggctgggcggcagattttttctggtgaaatccgtggccagggcctgctcccttaatacctggccggcaatggcaatggctgccagcaggaggaccgataccgccagcagcgcagccatggccttgcggcggttccatctgtgtctttgtgcgctcatgccctgctcctcctgattctgggatccaccgttccgtacaggaggttggcggtgaaattccctaaaaatacaatggccgcgctgataattgtaattcccataagcaggggcacatccccgcctaatccggctgtcacagccgcctgtcccaggcccggataggaaaatacctgctccaccagcacggatcctccgaatatctcgctgactgaggcaaattggagcgtcatggcaggaagaaggatgttgcggattccatgcctgcggataatggaccattctgactctcccctggccctggcaaacagcacataatcgctttccatgacctgcgccatcttctcccttgtatgaagggcaatgttggagatgcctgtaatggacaatgccgccgcaggcagtatgccatgaatcaggcggtccctcatggtcacagccgacgcctccaccccgattggaacagaaagtcctatggggagcagcttaagccagaccgcgaacacgacaagcagtaccagagccacccaaaaggccggcgtactggcagttaccagggcataggaagagataattcggtccgcagtctttcccttctttgccccggcaatgattcccatgagaaatccaatcaatcccgacaaaatccatgccgccgccataatccaaagggaattggccagcttctccccgattacctgggcaacaggcctgcggtacaaaagggagatacccatatctcccttaagaaaatcaccggcccaggccagataacgggttacaggcggcgtgttgacgccccagtattcctggagtctggcaatctgctcgctgctcatgcttccaagggccgcctgccccacattggtggtaagcggatccaggggagaaaccgacaccaggaaaaacgccgccatactcaccagcaccagcagaaccgccatccgtatgaaattaacacccgcctgtttccaactcatgattttatccttcctgcccacatacaattctgtctgattttattcccagctccactggtccacattatttacaatggaccatccgtgtccatggggatggattttctgttccgccacctttagtccgtccctggaccagtacagatggtctatattaaccagccaaatccaggggatatccccatcctgggtcactcccgcggtcccgtcccactgggccttcttccacagctcgtaggaatcctccagattcccgctggccagggcttcgtccatgtaccggtccacactgtcattggcatagggagaatactccgccaggccggtatccttcatggtatggtaaatattgtaaagctccataggcgtatgggcgccccagccccacataagcggctctgtctgggcgcggtcataggcgtcatcccagccaacaccctctatcttcacttcaattcccacttccttaagctggttggccgtgtccgctgccagagcctggcgtacggaatcgctggccgggtacatcagtgtaaatccggccctgacaccatccttttccctgattccatccgctccagccttccatccggcttcctccaaaagctctgctgccttttccgggtcatactctgttttcgcagactcattgtaccagggcatcttgtcacacacgctgtatgccgggcttccgtagccgttcagaacatgttcaatcatttcattcctgtcaattccaatgttcacagcccttctcacctgtacatccgacgtaaaatcatttcccacaacggttttgccgtcagttacagtgcctgactttacagccggaaggttaaagccccggttatccactgtctcgaaggaaaggagctcatatccggggagggtctggtctgaataggacgcagccgtataggccaggtccacctgcccggacatgacagctgcataagccgcgtcctcctccatgaaaagtatggtcactttcttcattttcggctctgtcccgtaataatccgggttcgcctcaaatatgacctgctgtcccttatcccactgtttcatgatatatctgccggatccaatgggatgtgaaccgtaatccgccccataggcatgttccggtacgataccgacaattgccatggtgtagggccagatggagtagggccgtttcatatgaaataccaccgtggtatcatccagcgcctcagcactctctaacatggtaaagtcgttgacagagctggtgtcccgcagggtattgtatgtaaatgccacgtcccgggcagtcagcttctctccgtctgtaaaattaacatcatcccgtatattcacggtccaggtaagcccgtcctggctcacctccatactggttgccaggtcatatcctattttcaggtcagcagtcgtcacggtcagcgtactctgaatcagcggctcgtggacatgttcgcccgccccccatccgtaggcaggatcaaatccggcctccggctctgaggttggtcccatgacaaccaccacgtcgtcccttgttccattattccccgtctccccggcgccctttcccgcactgttttccgcacggtttcccgcgctgtccccagcaatatctcctgcacggtttcccgcactgctccctgcactgtctacagccgcagatattccgctgtccttagcgctgtttcctgttccgctgcctgcgcagcccgtcacagccatggacacggccgccatggctgccacggcatatttcattcccgttctcattcctcgtctcattttcctctccatttctttttcatgccctgtccgtatgcctggattccataaacttacattccatacactcacatcctattcctgtaagcgcagacgccatgaactcaatccgcaccccggcgcaaaagcataaaaaaataccagaataagtgtattccttgagaatacatcctaccttcctggtatcccttacttcttaaaacttattcaatctcactaaaatgcgcttgtctggttcattctggatgctgacttctgtcagccgttaagaaaattatacgcaaaagtccgcaaaaaatcaacgcttttcttgccaaacgtttgcccatatattaaacagtctgcctgaaccatccccatgaggagaaaagttcccggggaaccaacaccgccccgggaacttttaagcgtatctatgcgcctttcttaccagtctcttaatttattcccccttctgctgaacctctacggtacgtccctccacgtctttcgggtctcccacggtcagtcccgggacctcctcatccgggcacgcgtttgtccatgcaagcttcatgacatcgtctgctgtcagctccttcttctggatcactcccaggcggatgtagtcggctgcaatattgccaagggcctcctctgtgattgcgtcagacaggccgaaatccagggaatcccagaactccagctgattttcaaactcacctgtcatcttattggtgtcaaacattaactgcacggcatcctcagagtggagacgggcatactgccctgcacgtttaatcgccataacaatgtattttgcgtgaaccgggttcttcgcaagaaaatcattgttcatggcggttgcgcagcacacctctccctcgaactcatcgctgggggtaatggagcataccttgcgcatcttatctctgtaattggcgattacaaaataatccgagaaaatggaagcgtctatctcgccgctctccatagccgcaacgctggccgcgctgtctgcgatatcaagatattccacctcagaggtagggtctatcccctccccgtccagcattcggtagataatattctggtcggagtttccgatgccgtcatggatggcaatggtctttccctttaaatcctcagccgtctttatctcgctgtcattgaatacgtagatggatttgcagcccatgtgggctcctgctacgaatgtcatatccacaccgtttgtcaccggcacaagcatggttgcaatatggtctgttccccacaggcacttccctgtgccaaccgtgatcacaacagactctccttcaatgtattccgcgttaataccgtaatcctcataatagcccagtgcctcggcaaggtataccgcagacacgcaggcccctccgttaaacagataatttaatgttgttccgaaggcaggctccttctgcatggcctcccaatcctcctgggacacagcctccgggcgggcggcgcctccggttgcctcctcaccggttttcccggaatcctgtggctctgccgctgaccctgcttccgcttttgtctccgctgccacagctgctgtggatgcgctttctgtggttgcgccttctgtgggagagcctcccccctgttccccgcaggcgctcagggataaggccatcattcccgcaagcgctgccgccagaatgcgtttcgcatttgtctttttcatcatactgttctcctttttgcttttaatagttatttatgtacacaaaccatggggtctgcgtttttttctttgcagggtcctgtcccatttaccgctgacctctgttttttccgccgaagtgcaggcggttgaggatttcattccggcaggccacaaaggtctgcgatgagcgctccctggggtaggcctggtctattttaatatcagaaaccacccgccccggatgcgcgtccatgacaatgacccgggttcccatataaatagcttcatccacatcatgggtaaccatgagcgcaagctgctttttctcctgccacacctttaagatttcatcctgcatattcatacgtgtgaatgcgtccagcgctcccaggggctcgtctaacagcagtatatccggctcgttaatcagagaccgcaccagtgaaacccgctgtgccatgccgccggaaagctgtcccgggtagtcgttcctgaaggattcaagaccgataattttaagcatcctctctaccttctcctcattccccttcagctttccctgcagctttaagctgaaggaaatatttttttccactgtcagccatggaaaaagggtgggtttctgaaacatcattccccgctccggcgacggccctgtaatctgcgccccatttacggtcagatagccggtggtaggcggaatcagcccggccacaaggcggagtatggtggattttccgcatcccgacggccccacaagactgataaattcaccgctcttcatggaaagattcacctcgtttaacgcgtgggtaacctcgtcgtgctccacctttgcaaaactttttgatacattgtccaaccgaaggataactgtattttctgccattatttcactactccgttctgccacctgagaacccggcgtttaatcaaatccagcacctttgtcacaatagtaaaaataaaacagatgacaaacagcgctgcaaacattttgtcgtaggccgcccaggatttagcccagttcatataccatccaagtcctgcctttacccccatcatctccgcaatcatgattgcaacacaggaggagctcatggcctgggtgcagccctgtaaaatagagggcattgcatgaggaatcgccacccggaatacaagctgcccctcacttgcccccagggtccttgcggcctcgaagaaatccttgtccacattctggatgccggacatggatgccacggtaactgcaaaccaggatccaagggcgatgataaacacggctcccctgaacagggaggctgccacaaccatgataatgggaatccaggttgcggtgggaatgggtcccagaaatttgataacgggattaatccagtaccgcgccttctcggaataaccacaggtaattcccgtaaccagtcccagggcaattccgataaaatatcccaaaaacagcaggcgcagcgtgtgaagcgtacattcaagcagataagcccggtcctcccatgcaatgttcaatatgctgttcatacacggaacaaagggctgggacaggatgccagttttcagagtcagataatcataaaaggtaagcaggagaaaaaaagcagaaaacaaaggcgctcggtagcgcaggtcctccgcagtccgcctgtcccccttcctgtatttaatcccggctgcaagggcatagagcgcgtatgcagtcataaaggctgccactgcccacacataggtgtaaggatggctgtttggacttccgtttgggacctcccagtactcgataacagcgatgaaaccgcatataaccggaagcagcataataacgaggtccaggattttctgaccgcgtgttttttccttctgctccagttcctttagctgctgtctcgtcagatgtcccagcggatttatctggctgctgccagagacaggcttttcctccatagtagttgacatagtccttctcctctgcatgtgatggatattaaagcattaaaatatcgcgtttttattttaatccaaattcaacggactgtacaatttaaaataactaagatggaagccgggtttatagcttaattctataccagtttttatgagtcatcagaaaccggcaaaacaccctcccgttttatggatatttgcgcaaaataaacgcaataccataaaagggagggtgttgatacggcagtgtacattgcctctttattctgttttcctaaggtttatatcagcttaccatgcatatggcacgcacacccgcagtcctcctgtcccttaccttcatacgcctcatccttcatcatcagatggacggcgcccagcttaaaggtctggggaagggccaggatattgggattttctcccacgaacttttttctggcgtcagccagcgcttcctcgatggtggccctggtcttaaggcccatccccctggcatagcccggttcctgggcgccgcacagatagatggcggaggtattcatttccgctatatgaccgcagctaatcatggaaaagccgtggaatgggtggaacgcattgcagtaacggtattttctgatgtattcctcattggtggcgaagtattcgccgtaccggttcatgtccggcagggtattcataaaatcgtgctggaacatctcatacatttccctggtgtagggccacagctcatcgtggaaatagccgttgcacagggaggaacagataatcacgcagttatcgctcatgatacgcttatgccggatgacctgggccgagatggcctgcatcagcataatgggattggtgcccatgccctcgccgtaatggaaaaactggggcatgccgaatatcattacatcatacttcttttcagcccacggcacataggtcctcttatccgccgtaatccaggagtggggctgcatgacttttgcatatccgctgttaatctctatctgacgggacctggtgtccagcactgcgtcacagcagaaaaacttctttcccatgcacttttccatgtactggccaatctcatcaaattttgtcctcataagcgacgttccgctgaccggagtaaaatccttacggtgcatgacctcaggtacatggtgggaggctatggatcgccaatgggtgatgcccgtggcgcagtgcttataccctccggagtagccgccgtaggggttgccctgggtgtgtccgatcaggattgccacatcgctgtcatacacatatttattcatgagcaccggatcgccgcggtccgtggtgcccaggtccaccagatgctcgtaatcctcgctgtcatggttgataatctgatgtgtgtgccagaactcatgaaacagctcatccccaaggatgttgtggatttccgtctccgtgttcttcctgtgaagtccgttggaacagattaaaaggatgtccttcttctccactcccgctccgtacagctccttaagtatcaatttaatggatatttttctgtgggaagtgggctgttcccctccctttaccctgtccgggaaaatgatggtcactttggagcccttatgggccagtttggacagtggctccattcccatggggtttcgtatggattccagggttttctccaccagctggtcctccgggatacagggcgggtctgccacagtctcgccgggtatgaacacgtcggtgttgtcaggaagctctgccgccataagccccgcaccatattcaaatgataacttcatatgataatcctcctgtgattttcaattgggttcgtaatattcagtctcgctccagataggtgcgcacgatctccagatactcctcaggatagaatccaatctgtccctggaacctggtgagggcaatcaggccgccgtccatgacaggaaccgaagccagcatcctggcattgtccgtcttaagtccgcctccatagaccacatccatccctccggtcatctccttaatataggtaccaatcttcgtgatatatgcttcatccggcggcgtcttgcctggcccgatggcccatatgggttcataagcaatgaccaccttctccttatccacatccttaagccctgtttccagctgcgatttcagtacttcctgccagtgttcctgttcaccggctgtttctccgatacagtaaagaacggtaagaccggcctggatggctgccttgatttcctgattcagcagccttcctattgcgtcttcatccgtgaccccggcttcttccaggattccggccttatccctgcgctcctcgcagtgtccgataatgacagaactgcatcccattgccttagctgcattggccgtgcggttggtggtaaatgcgccgaaattgccgttctcagccgtatcatccctgtacactccctgacagccaatcttaaccggactgtgctcacacagggcttttactgccggaataagatgggcttccgggaaatacatgacgaactccacatcctctgcgctgtacgccttcagcttttcctgggtgttctgaacaatatagctcccccattcctccatgggcgccacaccgttgacccctccgtactccctgggtatatcgaaccgtttcaggttcagaaatatgtgtttcattttcccactcccatcttttcatactcttctttaaaatccacaaaatccctcagttctggtccgataagaggcctgcaccatttcagaaacgcgtccgtcacatcattgcccctgtcatttatgtactcatccggcagaacccgctcatgaagcatcacctctttgatgggtatggccgaggtatggacatgatacccgccgtcctctttctcatcccgtataaggccgaccatgacgccgctgcggccggccatggctgtgcgcagcgcctgacggccagccagaactgcctcgtcccggtccacaggagactgccaggcaatggacgcccttccgcaaagaccgggcttttcgcttctggccttgattcccagcttctgaatgaccagattcgtcagataagcgctgacatccccatagtaagtcgctctcccaaccttaaaaataggaggcacaatgggctctcctttttcatttttaagcccctcgctggcaaccaccaccacgcctcccttttcatcgtaaaggcgttttacatcctccaggaattcctcctcatgaaagggacgctccggcagataaatcagatggggcgcatcccccggcttcttcctggccagggcagacgcagctgtaatccatcctgcgttgcgtcccatggcctccatgacgcacacatggatgggcagggctttgacatccgctcccacctctgcggcggacgcggcaatgaacctggccgcgcttccatatcccggagtatggtctgttatggcaatgtcattgtcaatggtcttgggaattcccaccacatagatgtcctctcccctgcacgcctcaaagatgcggccgcaggtatccatggttccgtttcccccgttgaggagtacataccgtattccatatttccggaagattcccgccatggcattgtagtcctcctgtttaagggcataccttgaggatccgattgcggtggccggcgtctgaagcagaagactcagcttttcctccggatactgcatcaaatccagaaaactctccttcaggattccttcacttccgccaattgccccgtacaccctgcctatgctgccggagcttttggcttcctccactacgccatacagggaagcattgataacagctgtggggccgccgccatggaccaccagaacatttgccgacattgcctctaccacctttcttgttgattcaatctggattttattaaatctgcattttcttatagcgctcagccatctcctccagggaaacctgttccaccaggggagctttgccgtaagagccaaactgtacgatgagggttcccaccacttccttcacgccccgttcaatacagtccgttatggctgccgtgtcctcatccggtatgacgccggtcatcaccgtatccatgattggagtcaggaatacccttgggtcaaactgctctcttttagactctaaaagctcatagatggccccgatggagctgctgtttctcttctccgggttccctgcgaaaaactccttcatattgcgggtaacagccagcctgatgtccgtatccacattaatcttgttgataccgcatctggccgcttcctgcagttcactgacggcaattccataggtgccggtcagcgtgcctcccagcccgttgatttcatccacaatataggccggaaccgtggacgagccatgggataccagtgccccgaaaataccctcatgattcaggcactcccggatggccaccgctatctccttgcgcagctttacattctttcccttggaagccccgtgcatggttccgtaggatatggccagggcatccacgccggtcttcctgaaaaattcaactgcctttaagggattggtataagtggatccctctgaaaacacatggtcctccaccccggccagcactcccagctccccttccacgctgacgcctcttgcatgcgcgtatttcaccacctcccgggtcagctccacattctcatcaaaggcaagggacgacccgtctatcatcacagaggtatatccccctgctatggcggccgcacaggagtcaaaatcccgcccatggtccagatgaaggacaatgggtatggggctgtcctccccatattttttcacggccccggcaatattttcagcgccctttttcttatcctccagggtcgcgttcataaagtcgcatcttccccccataaagccgtttgccaggtcggccccctgcagtatggcagcggagcggaacatctcatggacctggatggcagcctttgcctgggccaccgcattgacgttgaaagcgccctgggcaaatccatgtttaacagaagcctccatgagaggtctcattggaatcaatgtcatattttaccttccttttccgacgtttcatccccggcagcgtcatgccttttccttagaacctgcaagccggataatgtcttttatatcttcgcgcagccgcagttccgcgtactgtgataatttccaggcatggccctggtccttcccctcagccagcccctctttcagatagttcacatactggcagcgcacctgggtaccaaaattgattttggccactccgctgtcaatggagcgcttcaccagctcctcatccatacccgtacagccgtgaagaacaaagggtatatctgtaaacttcctgcactcctccagcacctccacccggatatccacagggccgttgtaaaacccgtgggcattgccgatgccgatggccagtgaatcgggatggcagagcttaagatactgcctcaccacatccggatccgcaatattggatgcgcctatcttgtttcccctgtcatccaggcggcacagctcgccgatttccgcttccagcggcacgccaaaggacctgcacaccctggccactgcctctgtggcagccgcattttcctccacaggcagggcggaaccgtcaaacataatagaggtgaatcccagcttcagcatctccatgcagcgctcaaagctgtccccgtgatccagatggattgcaaccggcacagataccttgccggccatccattttgccgtctcataaaaccagtcatggcctgaataggccccggtattcacatagtgggccaatataacaggggaacgaagctcctccgcagccatacatacggcccgtatgatgtcaaaggttcccccctgggtattgatggcgggaaccgcataatgtccttcataagccttctgaagcatttcataagtggttgtcagcatgcttttctccttctcagatgttcacgatgactttcagataatcggacggggactgaatcatatcctttatggtatcctccacctggtccagttcaatcatttttgttatgatggcgtctgtgggtaccttgccctcgtttaccagaccgatggcctccgggaatttcccgttggagtttctggacgggcacacgtcgatttccttctgcatcaggcgcaccgtgttaatcaataccgggtcatggggccatcccaccagggcaatccgtcctccatggcacacataattgtgcatgttctccaggatcaccggcgctcccgtacaatcaatcatggcctcaggcagcttaccgcctgtcacctcccgcagatattcctccacatttccgtctttggagttaaaggtgcatggtactcccagctcctttgcgtaatccaggcgcttttgcagcacatccaccagtatgggggttgcgccgtaattaatacaggcaaatgcagccataaggccgataataccggcgccgaacacaacacaatgctctccccttgataccctggccctggtggccccgtgaaggccgatggttaagggctccaccagggctgcatgggtaaaggtcagttcatcgggaagcttatataaaagctgcaccggatgaaggaaatattcggacatcatgccgtccttatgtacgccgcacacatggagatccgcgcagttattgaaacgccctgccgcgcacatatgacacttgttgcagggtacatagggttccagggccacacggtctcccggctttaaccccttgtcattctccccgatttcctggatgatgcccacgccctcatggcccagcccgttaatgggatagcgcatggtggggttcactcccctgtaagcagtcacatccgaaccgcagataccgcacatttccatctttacgattgcctgtccttctttcagctccggcataggcaaatcttttatcaccaggtttcctggctccggcagacataataccttcatgttttcaatcctcctgattctatatttctaccaccatttaatcttgtcagttatatagttgcggtattggataaattgggaggatgtgatatccctgggtcttggcaggtcaatccgtacctcctcctttatcttcgccggcttgttgctgagaatcagcacgcgctccgccagatacacggcttcctctatgttgtgggtgatgaataccactgtgctccccagttccttccacagacgtataacctcatcctccagataaaagcgcatcttcacatccatctgtccatatggctcatccatcagcagcaggtcgggctgcatggcaaaggaacgtccgatgatgattctctgctccgctgatacggacagctcgcccggataagccttcctgaactcctgaagtcccatcagatccagtatctggttcaccctgcggtcgatttcagccttgggaattctcttaatcttaagtccataggccaggttgtcctccacggtcagccacggaagggcgcttggctcctgaaatacaaaagaaatgttatgtttgcgcgggtccgcagggaccccgtctatatacagatcgccctcgctgggcatatgaatcctggtaaggcagtttaaaaatgtggtctttccgcagcctgtaggccctactacacacacgaactcgcctttacggatattaaatgacatatcgtccagcaccagcaggtcgccgaatcgctttgtaagattcctgacctcgacttttatgggccgggtatcctctctttcaggcatttttgtcctcctattaaattgctaaatcagtgttgtcggaaataaccgtacgcagcttcaggaattccccgctcaccatatcccttggcctgggtatgctgatgggatatacttcctttaccgtggccggacagtcgctgagcaggatgattctgtctcccagatagcaggcttcctctatattgttggtgacaaatatgacggtacgcttttccttttcccagattcttaagatttcctcctgcatctgatagcgggtctgggcgtccagctgtccaaagggctcgtccatgattaacagcttgggatccgccgcatacgccctggcgattcccaccctctgcttcatgccgcccgacagctgggtgggataggatttttcaaatcccttaaggcccaccagctctatgtaatgctgtgcaatctccctgcgctgtcccttggacatgccgcggaatttaaggcccagctccacattttccataaccgtcttaaagggcatcagagccagcttctgaaataccatgctgatttccgggtttacgcccttccactccctgccgttgtacactacctttccttcggtctgctgctccagtcctgcaatgatgttgagcagcacggtcttgccgcagcgccccggtcccaggattaccaggaattcgccgtcgtttacatcaaagctcacatcctttatggctgtaaaatatcccttatcgctgaaaaacgtcttggatatcccatttatttccattcgtttatttagttgttccacgggcacaccaccttctcaagtttttgaagccccagtgacaaaagggcgccaataattgcaatggttatgacagagacaagtaccagggccatatcgcttccctgccagcctctggtcaccagtgctcccagtcctttctgggctcctaacatctcagccgccagcaccgttgtccagcctgagctgaccgaggtccgtattccggcaaagatggagggcagggctgtggggataacgatatccgtcagtatctgcctgttatttccgccaaatacatggcctacatccagattgattttatccaccatctcaatccccgtggaggtgttgatgactaacggcacaaaggttccgatgaacaccagcagcacctttggaaattctccgatgccgaaccacatgattacaatgggaatccaggcaatgggaggaatggggcggatgacctcaaatatactgccgaagaatgccttgcattttttattccacccaatgagaataccgaaggaaataccaaaggcccatgcgataagcagtgccatgagtacacgccttaagctggcccatgcatgtcctgccagggaggtctttgcaatgggtttggtaaatgttttcacaaaacgcgcccatacgtcggccggggcgggcatcagctccgggtgactgcccgaaaacaggacccagcccacggcaatcatcaggattgccagtacaggcaggccgtagtacaggacgtttttcagtgttttctgctgtttgcttgctacatccatattccttactccctcctacctgtttaccttccagcgcaggaaatatttttccgccctggacaaaaatcctgaaagaatggctccgatagcgccaatcaccaccatacccacgattacaatatccgggcgggccactgtacggccaatctgaatcatatatcccagtcccgcgctggctgccagcatctctgccgccaccagggtggaccaggaatttcccaatgccacacggattccggcaaataccatgggaagggaggaaggcacccccactttccagaatatctccgcattggaggccccgaaggtcctggatacattgattaacgtcttgttggtcagctttatgcctgtataggaattgatgacgcacggcacaaaggcggtaaaaaagataatgagagcctttgccttcagcccaattcccatccacaccactacaaggggtatccaggcaatggggggaaccggcctcaccagctcaaagatgggacggatgaaacggtccgcataggtccaccagcccatgaccagccccaggggaacgccgatgatgatggctgccaggaaaccggataaggcaacctggaggctggccagtatattcacccaaaggacgttgccgtcaggggccttattcgcaaacttatacatcagggtctcaaaaatctgagtgggtgcgggaagcatcctttcattgacaagacccaggcttactaccagctgccacacggccagaagcgtgatgatgcctgccgcgcttaacagggcgtaattcaggccttcctttgatttctgctttttccacgccaaaaggccagcctctaatttctcatttccagttgccatatcggtatctcaactcctttttaatttgcggtttcggtcagaacctcatttaacagctttccatctgtatgtcccacgaatctctcctggtcgccttccttatagttgcccacgctgatgaagaaatcaagtacgtctaaaagcctctggtccataactgaatggtcggaaccctctgccttgtcatttaacatgccgcatgcctcctgaagtgtgtaatatgtatcggcctccagatattttgcggttgtctccctgtccatggagcttccgttctcatcgttcatgtccacgcagtagtcaatggccttttccttgttctccttcatccagtccatggtcttaaagtacacttccataaacaccttcatggcctcatacttatccggatcggcatagctgttcttatttgccacaaagctgcacatcagaccggaatccgccatgggaccgctggccacaggtatatacttatcggattcagccagcatcttgaaggttccccctgctcctgtcagcacacacacgtcgccttcgcctgccaggaatgcactgtaagccgtagccgggtccatggcgataaagttcacatcgtcaaccgtaagtccaaagccttccagtaccttaatcagcacatactgggtaacgctgcccgtgttgcacaggatggattttcctttccagctgtccgcatccccgtagatctcatcgctcagactgttatgtcccttgccggccttcacgatatctgaatcatttctggcaaatacatactgtgttccatcgtccgtattactggatccaaggaccagcgcatcgtatcccagaacgccggcaaacacgccgcccacgccggtgcagccgatatcccagccgtcagatgaaagagattccatctgtaccgggccgttggtgaacagcacctcctcaatatccagtcctttttccttaaaccagccttcctgctccgcaatgtagataggaagataattaaggctgcccccaatgcctgagaccgtaagctcgtaactcttgtccgctgttttgctgtcacctgttcccgatgcctcagcctgtgtatccgctttcttggattcggaaccagctccgcagcctgataccatcccggcacacatgactgctgccattgtgactgccaatgtctttactaatgattttctcataacgtttgacctcctgtccccaaatggttctcttatttttgctacatgtttttgcgtaataaacagccgcctttatcctttataaaagttgcatatttttatcattattttagttaaatagttaacatttacatcaatcaagcagcatgtatttgcggtacactatttatttttgactatttattacccaacttgcaaagtcattatagcaatatgaccatttcaaggcaaggcaattcaaaccaaacgtttgcgtaccaaaaccctttgaaaaaacattgatattccatgattctgcccttctttccctggtttttcccgggcatttttttacgcaaacgtttgtgtattattttatagtattccatgtccattttttgtatactaaaggcaaatagattgaaacatttgccttcaatgccccgtaagaggagggtagacatgactttaaaagaaatcgcccgggaagcaggggtatccatctccaccgtttcccgggtcataaacaaaaacagcaccaatgttgccagcaaggaagtccaggaccgcatctgggagattgtccgccgtaccggatatactcccaacgccacggcccgcagtctgaaaacaggagcagctaaagccgcagactcccccacccgctccattgcctgcctttacgccagggccgaagattccaactcagacctgtttttctccacgctggcacgcagcatcgaaaaggaagccttcaaacacaactacgtgttaaagtactcctttaccggcattgacattcaccaccccaatacgttccgcctcataacggataaccatgtggacggcgtggtggttcttggccggtgcgataaacagaccctgagctttttaaagaaatactttaactgcgtggcctatacagggctcaacctgttggaagccaagtacgaccaggtgatctgcgacgggtaccaggccagcctggccgccatgaataccctccttggactgggccatacgagaatcggcttcataggggaaacacagtttgaggataggtacacaggctactgcgctgcccttagcgcccataatctgaggccggccaagtcctacatcgtcaacgttcccctgtcctccgagggaggatacaagggggccaaggagcttctgtcccgcaaaaccgacgtgtccgccgtattctgctgcaatgacaacacagccataggcgccatgagggccatcaaggaagccggtctggtgattccggacgacctctccgtcatcagcatcgacgacatagacacagcccagtatctgtcccccatgctcaccacaatccacatacccgtggaagagatgggacagatgacagcaaaaatcctcattgaccggattgaggaaggccacaagcttcctatcaagatgaaccttcccttctatctggcaaacagggaaagctgtgccccctacgccgaaaagacgcagggcccggaacatgaacatacaatgccaagaaaagaggactaaaccatgcttattacacttacggattccaaaacaactgctgtcattgactccacgggcgcccagctcatttccctgaaggatgcttccggctgtgaatacatctggcagcgtgacgcgaaatactggaaaaaatgctcccctctcctgtttcccgtagtaggcaactgccggaatgacaggactatactggaggaccgcatatacgccattgaaaagcacggattctgccgtgaaagggactttgatgtgtcacagaagtccccagcaaaggccgtattttccatggatgacacaccggacacacacagggcatacccttacgccttttgcctctccctggcatatgagctgaaggacggcattctgtttatggaatatcaggtggaaaacagagaccagcgcgacatgtggtatgccatcggcgcacacccgggatttaactgtcccatggaggaaggctttgcctttgaggattaccagctggtatttgaaaaggaagaaaacaccgtcagcatcccttacgatttggagcagctgcacttttctccctccaaaccgggaaccaggctgaggggccataccctttcgctgaagcgcgaaatgtttaaaaatgatgccgtattctttgacaagctgaattcccgggcggtatccatcctcaatcctgccaccggccacggcgtggaggtggggtttcccggctttgaaaccgttgctttctggaccttatatccggagccagccccatacctctgcgtagagccctggaacggctccggcatctatgagaatgaggacgaccagctctcccataggcaccacatacagcgtctctgtccagggaacagctgcagctatatcatgaccatacgaatcctgggataaattttctccaaattaaataatcatactataaaaccggctctgcagtccatttccctaagtgcagagccggttttatcctttgaattgcgtacgtgccctattccgtagataccccttctgaaactaagcagtttctacgtcatcccacaagcagaatttttaaaaattccacaatggacacagcacctgcgtatgctgtcatatgcagggagcgcagctgtcataagagatggatttaaacccttacttttgctatactcagttatatccaatacctccctttatcccccactatttaacctgcgaatttccccggctaatcattcgacatttagcgacataatttatcgttttttgtcgtcctgtctaacttgataaaacccccatacccggtttaactttacaggagtcaaacgatatctggaggaatcatcatgaaatacgaaagagaaacctgcaacctgctccggcgcctcggcgtcaacaactcctacgtggggttccgctacacagtttatgatgtcatccgcgctattgccaatccggaactgcttatctacatttccaaagggctttacgtggaaatatccgcggaatatcatacatccattggctgtgtggaacgcaatatccgcaccatcatcagcaccatatggctgcatggagaccgtactcttctgaatcaggtcttcggctttgagttggaacagaagcctcgaaacggcgccttcattgatgcgctctctcactatgttgtagaacactattacgactgattctgtaaaatatatttagggtatccgtctgcttattctaagggcataattttacaaaatcataaaaagagaagggaggccaggcccggtgaccatcgggtctgtttgctgcgttcctatatagtgtctttttagaaataaaaaaagccctgcaaacacaggactcttacgtatgcggctaacaggactcgaacctgcacggtttcccaatgggacctaaacccatcgtgtctgccaattccaccacagccgcaaatataaaaaaatgcgggtggccggacttgaaccggcacggtatcgctaccgagggattttaagtcccttgtgtctgcctattccaccacacccgcagattgttacatgacacagctatatgcagatataaaacaaatggggcctacagggctcgaacctgtgaccctctgcttgtaaggcagatgctctcccagctgagctaagaccccaaattgcatatgttgtatcgcattataaaatgcaaacgacccggaacgggttcgaaccgtcgacctccgccgtgacagggcggcgctctaaccagctgagccaccgggccattatttagataatatagttctcattctgctttagttaggaagagtggaccttcggggactcgaacccaggaccgaccggttatgagccggttgctctaaccaactgagctaaaggtccgaactatataatctctaacattgtttactgttttacagtaaaagccgatgatcggactcgaaccgataacctgctgattacaaatcagctgctctgccaattgagccacatcggcgtatcataaactggtcaaatgaccccaacgagattcgaactcgtgttaccgccgtgaaagggcgatgtcttaaccgcttgaccatggggcctgaataaggtagtggtcgccatggacttccactaaaactccccgagtaggacttgaacctacgacagcgcggttaacagccgcgtgctctaccgactgagctatcgaggaataaaatgatacgcttattgcactttgcgctgaccaaatcattatacaataactttgccaaaatttcaagcacaattataactttttacgtaccctcaaaaccacatattgaattccgattgtttcacaaaccttttcttcccttaaccttttggataagccctcgaccgattagtattagtcagctccgtacattactgcacttccacctctaacctatctacctcgtcgtcttcaaggggtcttactcgctttcgcgatgggatatctcatcttgaggggggcttcacgcttagatgccttcagcgtttatcccgtccagacttggctaccctgccatggccttggtaggccaacaggtacaccagcggtctgtccatcccggtcctctcgtactaaggacagctcctctcagatatcctacgcccgcgccggatagggaccgaactgtctcacgacgttctgaacccagctcgcgtaccgctttaatgggcgaacagcccaacccttgggacctgctacagccccaggatgcgatgagccgacatcgaggtgccaaaccactccgtcgatgtgaactcttgggagtgataagcctgttatccccagggtagcttttatccgttgagcgatggcaatcccactttcataccaccggatcactaagtcctactttcgtacctgctccacccgtcggtgtcgcagtcaagctcccttatgcctttgcactctttggatggtttccaaccatcctgagggaacctttgagcgcctccgataccctttcggaggcgaccgccccagtcaaactccccgcctgacattgtcccccgcccgggtcacgggcgcaggttagaaacccaatatcgcaagggtggtatcccaacattggctccacacagactggcgtccatgtttcaaagcctcccacctatcctgtacatgcaataccgaatcccagtatcaaactggagtaaagctccatggggtctttccgtcctggcgcaggtaaccagcatcttcactggtatttcaatttcaccgggtgcattgttgagacagcgctcaaatcattacgcctttcgtgcgggtcggaacttacccgacaaggaatttcgctaccttaggaccgttatagttacggccgccgtttactggggcttaaattcaaagcttcgcttgcgctaacctctcctcttaaccttccagcaccgggcaggcgtcagcccatatacctcaccttacggttttgcatagacctgtgtttttgctaaacagttgcttgagcctattctctgcggccacatctctgtggcaccccttctcccgaagttacggggtcattttgccgagttccttaacaatgcttctcccgccggccttaggattctctcctcatctacctgtgtcggtttacggtacgggcatgtatcacacaatagcggcttttcttgacagccggaatcacacacttcgctactttagttcgctgcgcgtcacgtcttcggattgcacggcggatttgccaaccgtactcctacctcgcttgccccggtattcccattcccgggatgtgttgtccttctgtgtccccacagttctgatgatacatggtacaggaatttcaacctgttgtccatcgactacgcctctcagcctcgccttaggccccgacttacccagagcagatcagctttactctggaaaccttggatattcggcctggaggattcccacctccatctcgctactcattccggcattctctcttcttagcgctccacggctccttatcggtaccgcttctccgcactaagaatgctcctctaccaatgtacttacatacattcctaagcttcggtgttgtgtttcagccccggacattttcggcgcaggacctctcgactagtgagctattacgcactctttgaatgtgtggctgcttctgagccaacatcctagttgtctttgaaatcccacatccttttccacttaacacacactttgggaccttagctgtaggtctgggctctttcccttttgactacccaacttatctcgtgcagtctgactcccatacatcatttatgcggcattcggagtttgatatcccttggtaagctttgacgcccccttaggaattcagtgctctacctccgctaaactaatatgaggctagccctaaagctatttcgaggagaaccagctatctccgggttcgattggaatttctcccctatccacacctcattcccacccttttcaacggatgtggatccggtcctccacggaattttacttccgcttcaacctggacatggataggtcacccggtttcgggtctgcctgtactgacttgacgcccatttgagacttggtttcccttcggctccgagccttaagctcttaaccttgccagtaccggcaactcgccggaccgttctacaaaaagtacgcggtcgcaccttaacgtgcttccacagcttgtaaacacagggtttcaggttctttttcactcccctcccggggtccttttcacctttccttcacagtactatgcgctatcggtcactaaggagtatttagccttggagggtggtccctccgacttcccacaaggtttctcgtgtctcgtggtactctggatcctgctgcttcctattgttttcgtgtacggggctttcaccctctctggcctgacttcccagacagttccactaacaaatcggttcacgtttgcagtccttaaccccagcatgcacgcacgctggtttgggctcttcccatttcgctcgccgctactttgggaatcgatgtttctttctcttcctccggctacttagatgtttcagttcaccgggttccctctgcatggctatggattcaccatgcagtgactgaggtttgctcagccgggtttccccattcagatatctccggatcaaaggatatttgctcctccccgaagcttttcgcagcttatcacgtctttcatcggctcttagtgccaaggcatccaccctgcgctctttatagcttaaccaaatgatttcccgccgcgggttgctgcgggtcctctaaacgtccatagcgttggacgctttggttctaggttttcataaacgctttcgcatttacaagtttgtttttccatacaatctcttgtatggcctcggatgtcttgatattctgatttagaatatacaattcatttttattcaatatgcggttttcaaggtacgtttggtatgcttccgtttcctctgaggttttcagcataagcttcttccttttggttacttcagcaaatggagatggagagattcgaactcttgaccccctgcttgcaaggcaggtgctctcccaactgagctacacccccatagaaatctggcacccacctgctctcccatgccgtctccagcatagtaccatcggccgcttaggtcttaaccatcgtgttcgggatgggtacgggtgtttcccctaagcgcatcggcaccagaaattctttgtgtcctcttgattgaacactagacagtatataaaacccttacttcttcttccttagaaaggaggtgatccagccgcaccttccgatacggctaccttgttacgacttcaccccagttacctgccccgccttcggcagctccctctcttgcgagttgggtcactgacttcgggcgttgctgactcccatggtgtgacgggcggtgtgtacaagacccgggaacgtattcaccgcgacattctgattcgcgattactagcgattccagcttcgtgtagtcgggttgcagactacagtccgaactgggacgttatttttgggatttgctccacatcactgtcttgcttccctttgtttacgccattgtagcacgtgtgtagcccaaatcataaggggcatgatgatttgacgtcatccccaccttcctccaggttatccctggcagtctccctagagtgcccagctctacctgctggctactaaggataagggttgcgctcgttgcgggacttaacccaacatctcacgacacgagctgacgacaaccatgcaccacctgtctctcttgccccgaagggaaggcgccgttacacgccggtcaagaggatgtcaagacttggtaaggttcttcgcgttgcttcgaattaaaccacatgctccaccgcttgtgcgggtccccgtcaattcctttgagtttcattcttgcgaacgtactccccaggtggaatgcttactgcgtttgcgacggcaccgaagggctttgccccccaacacctagcattcatcgtttacggcgtggactaccagggtatctaatcctgtttgctccccacgctttcgagcctcaacgtcagttatcgtccagtaagccgccttcgccactggtgttcctcctaatatctacgcatttcaccgctacactaggaattccacttacctctccgacactctagcaaaacagtttccaaagcagtcccagggttgagccctgggttttcacttcagacttgcttcgccgtctacgctccctttacacccagtaaatccggataacgcttgccccctacgtattaccgcggctgctggcacgtagttagccggggcttcttagtcaggtaccgtcattttcttccctgctgatagagctttacataccgaaatacttcttcactcacgcggcgtcgctgcatcaggctttcgcccattgtgcaatattccccactgctgcctcccgtaggagtttgggccgtgtctcagtcccaatgtggccggtcaccctctcaggtcggctactgatcgtcgctttggtgggccgttaccccgccaactggctaatcagacgcggatccatctcacaccaccggagtttttcacactgtaccatgcggtactgtgcgcttatgcggtattagcagtcatttctaactgttatcccccagtgtgaggcaggttatccacgcgttactcacccgtccgccactcagtcaattaaaaatccatccgaaaacttcattttaattgcttcgttcgacttgcatgtgttaggcacgccgccagcgttcatcctgagccaggatcaaactctcatgtttaaaagttgattccaggtttcagactacttagcttggctagttatctttaaccttcattacttggttttgttctgaattttctcaaatccaaaggtctaaaccagaccttttgtttttagaattttcagggttttacatactgtctaatcttcaattatcaaggttctttgttgtcggcttgttcagcagcaacttttatatcttatcacagtcgcttgtgtttgtcaacaacttttttcatttttttatttcttattctcttgcgcttttggtactcaccgcagcgcaagagatatcttaccagatgcttcaacaaatgtcaacaggttttttcaacttttttcattttttgcatttttctatatccaacttgtttcaatccctatgattcccctggtttaaccggcttaaatccgacatgacagaacgcataaacaagggattctttttatattcagccatattacatgcctcgcatatcagctcaaacagcctctgagtactttctttccccatacctcctctgtatccttctgtacacctcctgatcttggatatccttgagagtccttcatgaatcatggctatccctgttcttttgtcataaaccttatcccacgctggacaatacacatcaacttcctccaatcgttccagacgctttaatgtttcctcactggcatgagagtcatcataaatcaaagcgtctgatggctccggtatggaatctccggtaaaaagtattttctgctccctgtaataaaaacacaatgattctctggaatggccgggtgcgcctattacctgaatggtaatcccaggttccaggcacagcagatccccgtcagacaagatacggtccaccgtaacagaaccatccaccagactataaaagccaggtatgggccgtttctcatattgaagatctatatcctcaatccaatcccgctctcccctgctggcatatacgcagcaggaatacatttcctttatggtttttagggcaccaatatggtccggatgggaatgggtcaacagtacagcatttatattttctctgttttttccaattttatgtatatattcctcaatttttttatcacatccttttacccctgcgtcaaccaggtaacatcctttctttcctgttatgatatacacatagacatatcttgtgatttcaggtgtaatattaaactgaacgcgcagctgatgaactctgtcatttatcttcattccattctcctctctctcttaccactgttatccccatacctctcccctgccgtgacaataatggcctggctgtccactgtatttttccttttactcatgatttttctgtatttctctgaggaaaaacaccggtctatgctctccctgtccggaaaccatatcataatgaagcggtccggatgccagtctttccctatatattcaatcccttcgctcctcaccacataccttcctccgtgttcttccacaataggcctgacccgttttatgtaatcgtcataatctgcccggtcctttcctggctccaggaaaacagaaataataaagtaacagctcatatcttctcctttctacgcaagtatccacttgcataactgttaaaaataaatggcaccgtatggtaccatatatttatgcatttacttggccactccatggacaaacgcatctaccattttaataatatactcatctgctttcatctcagtcaggccgctgccaaaagaggccttaaaaaatacaaatccaaaattcaacgacaaaaacatcatggccatactctcgtaatcatccgatatgagctttcccttctcatacattttcctgaaatatgccgtaacaccggttttaaagacctggggaatggctaagatcccttcccttgtatcctccgccagctctggtgtacgcagtcccagggagagcttaacaaattccggcgtgacttttttcatgtaaatacgggcaaattggcacaggtcctctgtcagattacccgtctcaatcataaaatcatccggttccaaatccggatgccatcttttctgtcccatggcctgaagcacaatttccttcttccccttaaattttctgaagatagtacactcgttcaccccggcacgttttgcgatatcctttgtagtggtagctgtatatcctctctccactacaagttccatggctgcatctataatattctgtcctgtctggtccatatcaccctccccaaagcgcaagtgtacacttgcatcatacaataatcccatctccctgtcaaggcttcctgtcacaaaaaggtcaagctgttcattattccctccgtatccagggacgatatagagccgccgaacataaccatctgcagtctgtctccattgattctggcataaaccttcaaaaatccgggtatgcccagagaagatgcatccatatagtgataactgtaccagagtccgtttgaaagctgactggttgtcttggtctggggtgtccccaactctgcttccacagctgcgtccagtacgctttcctggtaggtgtataccaggtctgcatatccgccaaagtccgcgagggattctgacatgatgcagataaggctgctgccgtccacactggtcatatatattcccctctcatcagaggaatgaaatacaaattcttcgggaactgtgagaagcacattaccaatctgttttattgcgccgctgtcctggccctgctcctgcacacctgtcagctcctgttggggcacctctgcctgttcctgcatctgcgcctgaacctcttgctgcatctgcaccactccgtcctcaatccaggccccctgcatgtcaacgctgtacccatctggtgtttgggtgttttggaggcaatagccatcctcattaaaataatagcatcttccgtctatccaggaccattcgctttttacatacgtgccatcctcattctgataccaccagccggtatcgtcctgcctccactggcctgcaaacgcgctcatactcaaagctacagtggccagcagcaccgcaattaccatcatccagcattttttcctaccggcggtgctcttatccgcggctcttttatacacagccctcttatcctttatcttcatatcagttgccctcccttagtcttatacttccaatatacttctcttttccagggacaagaacctaaaatcaacttaaattatacgtaacagttccatgcgccgtcctgaacagttacaattatacttctggatggaaaatataaaaacaaaaaaaccggagcaccctgtatcataaaatcacaaagctccggttaaacaacaaaaaagcgcgagacgggattcgaacccgcggcccccaccttggcaaggtggtgctccacccctgagccactcgcgcataaatgttatcattatattttcaaagtcggggtgacaggattcgaacctgcgacctcctggtcccaaaccaggcgctctagccaagctgagccacaccccgtcatcaccgtgtacataaatatatcacagatgatattaaatttcaagtacttttacgtaccctcaaaaccacatattgaattccgattgtctcacaaacctttttcccttaaccttctggataagccctcgaccgattagtattagtcagctccgtacattactgcacttccacctctaacctatctacctcgtcgtcttcaaggggtcttactcgctttcgcgatgggatatctcatcttgaggggggcttcacgcttagatgccttcagcgtttatcccgtccagacttggctaccctgccatggccttggtaggccaacaggtacaccagcggtctgtccatcccggtcctctcgtactaaggacagctcctctcagatatcctacgcccgcgccggatagggaccgaactgtctcacgacgttctgaacccagctcgcgtaccgctttaatgggcgaacagcccaacccttgggacctgctacagccccaggatgcgatgagccgacatcgaggtgccaaaccactccgtcgatgtgaactcttgggagtgataagcctgttatccccagggtagcttttatccgttgagcgatggcaatcccactttcataccaccggatcactaagtcctactttcgtacctgctccacccgtcggtgtcgcagtcaagctcccttatgcctttgcactctttggatggtttccaaccatcctgagggaacctttgagcgcctccgataccctttcggaggcgaccgccccagtcaaactccccgcctgacattgtcccccgcccgggtcacgggcgcaggttagaaacccaatatcgcaagggtggtatcccaacattggctccacacagactggcgtccatgtttcaaagcctcccacctatcctgtacatgcaataccgaatcccagtatcaaactggagtaaagctccatggggtctttccgtcctggcgcaggtaaccagcatcttcactggtatttcaatttcaccgggtgcattgttgagacagcgctcaaatcattacgcctttcgtgcgggtcggaacttacccgacaaggaatttcgctaccttaggaccgttatagttacggccgccgtttactggggcttaaattcaaagcttcgcttgcgctaacctctcctcttaaccttccagcaccgggcaggcgtcagcccatatacctcaccttacggttttgcatagacctgtgtttttgctaaacagttgcttgagcctattctctgcggccacatctctgtggcaccccttctcccgaagttacggggtcattttgccgagttccttaacaatgcttctcccgccggccttaggattctctcctcatctacctgtgtcggtttacggtacgggcatgtatcacacaatagcggcttttcttgacagccggaatcacacacttcgctactttagttcgctgcgcgtcacgtcttcggattgcacggcggatttgccaaccgtactcctacctcgcttgccccggtattcccattcccgggatgtgttgtccttctgtgtccccacagttctgatgatacatggtacaggaatttcaacctgttgtccatcgactacgcctctcagcctcgccttaggccccgacttacccagagcagatcagctttactctggaaaccttggatattcggcctggaggattcccacctccatctcgctactcattccggcattctctcttcttagcgctccacggctccttatcggtaccgcttctccgcactaagaatgctcctctaccaatgtacttacatacattcctaagcttcggtgttgtgtttcagccccggacattttcggcgcaggacctctcgactagtgagctattacgcactctttgaatgtgtggctgcttctgagccaacatcctagttgtctttgaaatcccacatccttttccacttaacacacactttgggaccttagctgtaggtctgggctctttcccttttgactacccaacttatctcgtgcagtctgactcccatacatcatttatgcggcattcggagtttgatatcccttggtaagctttgacgcccccttaggaattcagtgctctacctccgctaaactaatatgaggctagccctaaagctatttcgaggagaaccagctatctccgggttcgattggaatttctcccctatccacacctcattcccacccttttcaacggatgtggatccggtcctccacggaattttacttccgcttcaacctggacatggataggtcacccggtttcgggtctgcctgtactgacttgacgcccatttgagacttggtttcccttcggctccgagccttaagctcttaaccttgccagtaccggcaactcgccggaccgttctacaaaaagtacgcggtcgcaccttaacgtgcttccacagcttgtaaacacagggtttcaggttctttttcactcccctcccggggtccttttcacctttccttcacagtactatgcgctatcggtcactaaggagtatttagccttggagggtggtccctccgacttcccacaaggtttctcgtgtctcgtggtactctggatcctgctgcttcctattgttttcgtgtacggggctttcaccctctctggcctgacttcccagacagttccactaacaaatcggttcacgtttgcagtccttaaccccagcatgcacgcacgctggtttgggctcttcccatttcgctcgccgctactttgggaatcgatgtttctttctcttcctccggctacttagatgtttcagttcaccgggttccctctgcatggctatggattcaccatgcagtgactgaggtttgctcagccgggtttccccattcagatatctccggatcaaaggatatttgctcctccccgaagcttttcgcagcttatcacgtctttcatcggctcttagtgccaaggcatccaccctgcgctctttatagcttaaccaaatgatttcccgccgcgggttgctgcgggtcctctaaacgtccatagcgttggacgctttggttctaggttttcataaacgctttcgcatttacaagtttgtttttccatacaatctcttgtatggcctcggatgtcttgatattctgatttagaatatacaattcatttttattcaatatgcggttttcaaggtacgtttggtatgcttccatttcctctgagattccagcataagcttcttccctttggtcacttcagcaaatggagatggagagattcgaactcctgacccttctgtctcttcaacagccattcttccagaagaatgatatgatattcatacagggctaccctttcaaggcaatctcttatttaatttagatattacatgggcttaagtggactcgaaccaccgacctcacgcttatcaggcgtgcgctctaaccggctgagctataagccccggttaattctgcaaaagctacgctgtcacatcattaccttgctgtatatgttctcagtgaaagtgaaaccactgttcactgtaaaacttcttataaaatccggcagccacctgctctcccatgccgtctccagcatagtaccatcggccgcttaggtcttaaccatcgtgttcgggatgggtacgggtgttccccctaagcgcatcgccaccggaaaattttaagcaccttttaatcaaggactcaataatacataaacccctacttcttcttccttagaaaggaggtgatccagccgcaccttccgatacggctaccttgttacgacttcaccccagttacctgccccgccttcggcagctccctctcttgcgagttgggtcactgacttcgggcgttgctgactcccatggtgtgacgggcggtgtgtacaagacccgggaacgtattcaccgcgacattctgattcgcgattactagcgattccagcttcgtgtagtcgggttgcagactacagtccgaactgggacgttatttttgggatttgctccacatcactgtcttgcttccctttgtttacgccattgtagcacgtgtgtagcccaaatcataaggggcatgatgatttgacgtcatccccaccttcctccaggttatccctggcagtctccctagagtgcccagctctacctgctggctactaaggataagggttgcgctcgttgcgggacttaacccaacatctcacgacacgagctgacgacaaccatgcaccacctgtctctcttgccccgaagggaaggcgccgttacacgccggtcaagaggatgtcaagacttggtaaggttcttcgcgttgcttcgaattaaaccacatgctccaccgcttgtgcgggtccccgtcaattcctttgagtttcattcttgcgaacgtactccccaggtggaatgcttactgcgtttgcgacggcaccgaagggctttgccccccaacacctagcattcatcgtttacggcgtggactaccagggtatctaatcctgtttgctccccacgctttcgagcctcaacgtcagttatcgtccagtaagccgccttcgccactggtgttcctcctaatatctacgcatttcaccgctacactaggaattccacttacctctccgacactctagcaaaacagtttccaaagcagtcccagggttgagccctgggttttcacttcagacttgcttcgccgtctacgctccctttacacccagtaaatccggataacgcttgccccctacgtattaccgcggctgctggcacgtagttagccggggcttcttagtcaggtaccgtcattttcttccctgctgatagagctttacataccgaaatacttcttcactcacgcggcgtcgctgcatcaggctttcgcccattgtgcaatattccccactgctgcctcccgtaggagtttgggccgtgtctcagtcccaatgtggccggtcaccctctcaggtcggctactgatcgtcgctttggtgggccgttaccccgccaactggctaatcagacgcggatccatctcacaccaccggagtttttcacactgtaccatgcggtactgtgcgcttatgcggtattagcagtcatttctaactgttatcccccagtgtgaggcaggttatccacgcgttactcacccgtccgccactcagtcaattaaaaatccatccgaaaacttcattttaattgcttcgttcgacttgcatgtgttaggcacgccgccagcgttcatcctgagccaggatcaaactctcatgtttaaaagttgattccaggtttcagactacttagcttggctagttatctttaaccttcattacttggttttgttctgaattttctcaaatccaaaggcctaaaccagaccttttgtttttagaattttcagggtttgtgtattattcagtcttcaattttaaaggtacgatggaagcattgcttccgaccgcagaaggagggatttgaaccctcgcgccgctactaacgacctactccctttccaggggagccccttcaacctcttgggtacttctgcttggttgaatcttgtttcatattcaatttatattcgcaggcaaatcactaaaactcgtctgcagcggagagggtgggattcgaacccacgcgcccttgcggacaaacggttttcaagaccgcctcgttatgaccacttcgatacctctccgaacgcgcttttccattttacagaagtttcgacgttttgtcaagtactttttttattttttcaaaactttatttttctaagttttgtgttttgctgctgttctcagcggcaactcgattagtctatcatgtaattcgacagatgtcaacattttttttaactttttttctgcaggttgaattttccaaaattaggaagattcaacctgcgttaccaactgttattcattccaattcctggtaaacctcttacaggtccttatccacggcccagcggtccagctgcttcaggaatcttctatcctctgaaactaccttgactggttttttgtaatctatagccatcagtcccaatacggattttccgtctgcaatctgattatccattgtatgtactccaatatccaatggagaagcacaggccagatgcataaaatctcttaaatcattggatgtgtacagcataatttcacgtaccatattgatacctccttattcgggcatagtataacattttaggataaaatatacaatatccaatcatgattttatataattccattgagtcagagcagtacgcagctcatccttttctgccgctgccttttcaaatggctgtccgctcatcacaatctcaatcgcctggcgcattgcccgagcccctgctgctgcaccgcctggatgtccctgaacggctccccctgctgccagaaccacatcttttcccacttcccggatatacttttccaccatccccggatggactccccctcctatggacggcatagagggcttaatgtcatagaaaggaagcgtgagctgggctactgtctgcatatacttttgatggagaagcggatagccgccatagggtgtattaatcattacaatatcagctccagcaagccgtgcaagctttcccacagcaaggggagaggccattccattcatggctccttcaaaacacattccagtacctgccgaatgtcccaggataggaagaaccgtatgctccgccacatgcttaagcacgctgtatcccatggccgcaaaattaatcatcagtccatctgcaccggcatcctctgcgcgttttacattttccataatttcacctgcgccgctggttatgttcacaaaatatttcacccgctcccctgtcttctcataggccgcctcagccgcctctctatatgcccttacccgttcttcgggcttgctgtaaacaggatttccaaacaactcatcgtcctttataaaatccacacctcccagtgcagtctcataaaatatccttgccccctctcttggagtcagtcctgtacacggcttgatcatattcaacaaaatcggccggttacttattccggcaaacttctgaattccttcaatcccataccgcggtcccctgaatttgcgggcaaactcctccggaaactctatatctaaaagttttacctgggctgaggtggaggcatcgttgcctaaaagcgcggtaataagcagcggcaggtctgtaccaaagtttacagcaggataggcaatctgaatcagatattctctctggtctccggtaatctgagtagccagatccagggaaggcacatcaaatacgttcaccaccttccccatatatttttcgcgaatctcctctgtaattccaggtatgggaatccatgttccaatggtctgccccactgcaagggctgccgctttcttaaggacatccacttccttcggcagactgatatgatatgttgctactgcataattttgtttgtgtactgtctccgataatgtataaagtaaagaatccatcttttctcctttaatccgcaacgctcatatgcctgacaaaacaaaagagcccggcatcctgtttcgatgcccaagctctgttatcactctctgattctgctatatacttatatcacgatttacgcattctcatgaaaatacacatccaaagagtaaggaatattctccgttctcttcttcagattctgagccaataaatgactgattcgttcgctgtcccgttgtttcaaggcatccagataactctggtgctcttcaatcatcctttccctggattcccggccttccaacagtttctgaccgtaaatcaatttaaagaacgacagattatcccacaacgattctatcatcgcacagattctgtccagctggctgattttatagattgaaaaatggtacaacctattctgctgatacacatcaattgcatcaagctcctcctgcctgacaatacgaatatattctgcgtgaatctctttcaggttttggatgtcttcatctgtaatcttctcacaggcatactttgctgctaccggctccaatgccgttctggctatatatatctgccgtacatcatcctttgtcaatgtcacaagcctcgtccctgcatatggaacagactccgcaagccctttcttctcaagattggccaaagcttcccgaatcggcatcctgctgactcccagctgggacgccagttcctccgtgttaagcttatcacccattgacagcttaccgctcataatccattccatcagcttgtccaaggccaagtccggaagcttgttatgctgaagcattcccctgtccagatcattcattgtaatacgcatattagatttcatatagctctcacctaagtaatatttacaagccaagcttcgaaacggtcacttttaaaatcgccacttgcgcggtttcttcaattaattctgctgtatgctctgcattaattgcatcttttccgactgccactaagccatgatctaccagtaaaaatccgggcaaatccgggttctctctatatatatcttccaccattgggaaatactctttctttaccatcgctgccggaacatctaacgaaggtaaatccgcgctcatcttgagctgggcgtgccacgtggtcctctttaaggcctttcctgtggatgcccatgcaatcgaatacggtgagtgtgtatgtacaacagcattcaccttgggacaaattctatatagcaagccgtgaagtaaagcctctcttgtaggttttccttccccttctactagatttccatcgaaatccgtgattacaaatccgtccggcgtactgtcaataaaagagctgccgcttgccttcacaatcatcaaatctttccctggcactctggcactcacattgccgccgcttccggtttgtatacctctagtatatgctcttttgcaggctatgacaagttcctctgcaatttttttaacatcttctgacatttcctggaacgccctccttgtcctaatattgtatttcatcacctatcacagcatgctctttcagttcgtccaccatatggtgggcggcctgaatgccccattcctctgtatccagatttcctggtattgtaatgatttccacattgggatttctgatttcctttaactggcgaatgataatatcatccacctctttataataaagcgcctcgcccttgcgtgtattatggcgcattccgtctgtaggaatcagaagttttaccgggtaatcaattttctcaatccgcgcagcaaatcttgctgttgtaatctctgcttcatccggaagcagcttgatatgagccgtattggcgttatgcatcatatagattctttcgtccatgcggggcggaaactctcccgcctgaaaatcaataaaatccaggccgcccacgctgaccaccagaggcacctttttctccaccccccggacaagacggtactttgcatcttccccataggaaaaaccgcctttaaaatactcctgtgtaatctcatgggttgttaaatccaaaattccgtctatcagcccgtccgccgccatctgctccatgattgctccgcctgcaccggtggaatgaaaaccgataggctctataccaagccgttccagctcatcaatggcagcacacgcccctgtgttcgtaatccccatcaaagtcacgcccacaaccggcttatcgccttttttcaggacctggcctgcatgtttcaccattcccgcacagcatgcacatgcatttgccatgatttgtctcgtcactatgttaagtccggtaaaatcgcatatggatggaatcgttactatatcctttgcccctaccacactttcaaatgttttgcggcctgatgccaccgtggttgccatgacttttgggaaacctatgggaagccgcttcatggcgttggttgccatgaccgtattctgaaggcctcctgctgaaaggattccgtcaatcttcccctctgcatacagtttctccacatacgacgccactgcctccatcataaatgcaatcttttcaccctttgtcctgggttccagctcagcccactctgtccctgctgctttggtgacatcttccctggaaacatcgtatccataagacggattggggcctgtggccacgttaattaccatggctttcattccctggctctcaacctgctcacgcatgtatgcaatctctctgtacttggtatcacagcttcctatgattgcgattgtattcatcactattcctccaatacgatattgtgaagaccatccccaacagtctccacaatatccctcatgggccccgcgttttcacaggtgcgtcttcacaggtgcttattcacattacttctggctgaagtactttgtttttgcctttgcagctgctttttttgcatctttatcaataatcgcgcccttgtactcatcaaatacaaagtccgtgtccttaagcccgattaccggaagtctgttttcatgggtatcttcgtatttctcaactgctgcggataagataatatcatgggcaagcagaagatgcttatgagggtcaaccccagcctcatggcagcggcggaccgtatcgcggattgtctgccatgcggccactatatcaacatagcgtcccggagggcagatatcatagtgaagctcatcctgcatggtctggggagcatcaatgttgcccataacgaatacagaatcccccacacaatagtacggtccgtcttctgtttcaaccacaaccgtcatatgtccggggcaatgtccgaatgactcatatacacttacccctggtgcaatctgtgcctcgccctttactgtctcaaaacgttctttcactcccggctggtcatatggcgcaatgaattcatcattgcaggtcacgtctccatctttggcgataatgggtctgcagtatgatttgtaatgaagggggatcgggttatgggcatagtcccactctgtctcatgacaaataaaacgtgcctttgtaaatttttcaagataaaatacatggtcccagtgcagatgcgtaaacagtacaatatcaacatcagatggcttaaagccaacctgggccagccgtgattcaatgtcatcaattcccggtctctgcacagacgggccatggtgatacttatcggcatgctccgtccaggacatacccgtgtcaaccagaatcagctggtctccgccttcaattaagaatgtgaaatccggaagctggtccgagtcattggtaatccccagcttttctacaaattttttacacgaaaaatgataccagtactccaaaggtttggtcggaatataaccagaattaagtggtcggattgttaatggcatattaattttcctctctttctctttcatgaattatctatcttaaaaccgccatgggtttatcccacaggccgttttaatccctgtttatatgcggcaattatgctgccttgctttcctgtcttctcttgctgtacgtgtcgaacagcaccatggcaatgattacaataccgattaccagcccctgcgcataggaggaaattcccttcaggttcattacatttacaataattgtaagtatcaaggctcctaccacagttccaagtactccgccttcccctcccagcatggaggttccgcctacaaccactgccgcaacggtctgcagtccgtaactgtctcccatggctgcatctgctgcatttaaccttgccgtcatcagcatgcctgcaaggcctgcgcacatgctgcacatcataaatgcagataacataactttttttaccggaaccgccgcgtatttggcagccacaggatttgagccatatgcgtacacctgacggccgtaggtggttttctgaagcaggacatatatcaggatgacaaccaccgccgctatgataatcaaattgggcacaggacccgtataccccacacctatctgggtaaaacccttgggaaggtcatatatgaccgccccctgcatgaccaggaccgcaagtccgctcatgacccagttggtcccgtaggtagcaataaagctggggagaattccggctaacagcccgttgatgactcccactaccagtccaatgagaattcccagaataaaggctgtcggaatgggtacaccatttttaatgcactgggcacagatacatccgatgaatccggcggttgctcccaccgataaatccataccgcctgtcagcagtactgccgtcaagccggcgctgagcaccagcaatacactggcctgcctgaatactgtgataatgttgtcgacggtcctgaaatttggggcggcaattgcggaaaagatgaccaggatgattaaacctatcagactgtaaaatacttttgaattccttatctcttcaaatattttctttgctttcatgtccctatcccccctattcctttgaacgagtacggacaaccgcatcaatgataatggccatcagaacgatagaaccaatgattgcattctgcttaattgactgcacacccactatgttcagaccatttttgatgacttgtataagaagcacaccaaaaatcgtgcctgtaacgccgccttttccttcacgcagagaggtccctcccagaagcgttactgccactgcctggaattcccagcccgtggctgccgtaggcatacctgcctcaatacggctgagtgtgatgatcccggcaattccggcaatgaacccggcaaatgcatatgtcttaatcaggcagataatgggattgatgcctgcaagctgcagtgcctccctgttaccgcccagtccatggatattggttccaaacctggtcttattcagtaccacccacaccatgataaataccaatacagcggcccagaccataagcggtattcccataatcatggtctctgtaatgatacggtatgtaaaacttggaaaatagatagaagagcctgcagccaacagtaacgaaaggctgttcagtatattctgcattccataagtcgcgatgaagggaggaatacttccttttgcaacaatcacgccattcgccacaccaatgagtgtagtggataaaacggcgagcagcattgcagccggaagcgggattcccctcagggccatccacacagtaaatacggttacaaagctgacctgcgcaccaagagacaggtcggttccctgcgtcaggacgatacatgtctgcccaaatgcaacaatcattaacggggttgcctgaatcagcacatttttaaagttcatcagcgtaagatagttggggctcataacactgaaaatcacaatcagaacaaccagcatataggctaccggaggcagacttttcattctctgcacaatcttattcctctgcatgctcagcacctcctgctcccagcatcatccgcgctccaatgacctcggaattgaatccgtctgttcctctgatgacctcgtccacgatttcgccctcatgcatgatataaatgcggtcgctcataccaattacctcgggaagttcggaagaaatcatgataattgccttaccctctgctgcaagcctgtccatcaaatgatagatttccagttttgcagccacatcaataccacgggtgggctcatcaaaaatcagaatttccgggtcaaaactcagccattttgccagtaccaccttctgctgattgccgccggacagatatttacatgctttattaacgctggttgtagcgatacgaagctgcttcttatatcccagcgcaacttcggtaattttcttttttgaaataaagaagttagggaatatcttcttaaggctgaccgccaccatattaagcgcaattgactcatccagagcaagcccctgcttcttgcggtcctcgcttaccagacctattccaattctgacagcctgcacaggcgactttggaaatacctggctcccccgtacgtaaacttttccagacttaatcttctcgattccataaagcagctcggccgtctcagtgcggcctgcccccaccaatccggccaggcccacaatctcgccttttctaacggtaaagcttacatttctgacacgccctttataatcgcacagattctctgttttaagggtaatcccttcatgctcattctctgtacgcgcatagacttgttccacactcctgcccaccatcatgttgaccagttcctcgttggtgcaatcgttgattcccaccgtattaatcttaaccccatccctgagaatcgtgattctgtccccaatcaaggggaactcctgcatccggtgggatacatagataataccgatcccctccgcctttagcctgtgaatctgtgcaaagagggagtccacttctctttccgacaaagttgcggtgggttcatcaaacaccataattctgggattaaatgaaagcgccttggcaatttccaccatctgctgctctgctatgcttaagttctttacataatctttgggattcatgtattcacagttcaacgcctttaaaagctttgcagcctcttcttccatcttcttatggtcaatcaaacccagtttggtcttatattccctgttaagaaaaatattctgggcaacgctgatatacggcaccagcgtaaactcctgatatactgctacaattcccctggcaagagcctccttggtcccgttaaacttaaccacctggccgtccagccggacctccccttcttccggtttatatgcgccgagaagacattttgcaagcgtactcttgcctgcgccgttctcacccaccaggatatgtacttccccttcctgcaaatcaaaatccacatcatccagggccttcatgcccggaaaaagtttggtgatatgcttcgcagttaatattgttttccccatcgtttcaccccaatacttctcacggaatttatttcctctgtattcgtccccgcagtttcctgcggggacaaacaggtgaaatagttcagtttcaattttgccgcattctactggatgaccttccaccatgcaatgttgtcaatgtaattttgaactgtatcggcaattacaagcgggtcatttgctgctgtgggaaatggaatgaacttgccttccggttctgtcttatcattcagatacttaactgcataggcacatgcaacaaatcctgaaccatatggatccgtgttataggtagcgaacatggttccttcctttacggcattcgtagcatcaacactcccgtcaaatccgcagaccagtacatcactcatgttggctgccgtcagggcctggactgctcccagggcactctcatcgttgcaggcgatgactgcatcaatgtctgtatactgctgaatcaggttttccgttaccgacattccttctgtcctcttaaagtttgcggtctgtgaagcaacgatttcgattccctcatactcggaaagaccagtattaataccatttaatctctcaattgcatttgatgccccggccggcccttcaagaatgatgaattttccttttccgccaagcttgtccgccactgctttggccatggtgtagccggactcgtaatagtcaacgcctgttctgaggaatgtatcttctgctgccggcgtgccaatggtcagcaccagaacacctgcatcctgggcttttctcacgcctgtcatgataccgttggagtccgcacagtgtacaataattgcatcaacatcctgtgtaatcatgttctccatcaactgtacctgctcctcaaccgagtccgcagtcgtcggtgcctgtgtgatcgcggtaaatcccatggccttcccggcagcctccacacctgctgactgagccaccatgtaaggattcgttgtgttcttggcaatgtagccgatcttgtaatcccctcccgccttgacgctggttgcaatctgagctccgattcctgtgaccggaagctgacttacatcaagcacagtagcggcagacaatcctgaagaactgctctttgtatcttcttctgcctttgtctcctctttcgcactgctggttggtgcctctgtcggtgtgctgcagcccgtaaaaagcatggcagacattgcagccgttaataaaattgatactactctcttcctcatttttttcctccttgtttttttatgttattttggatattggattttggatacaatcttcttgtgattaatatagcacttccaaatttgcttgtcaatattaaatagtatattcttgtttattgtttaatttttgtatatagtgcacatcactcttctgatttttctgtcaataattacaattgtcatttttttatcaggtatgtggatgttttttatgggattaatttatgagttgtatatagactgaacgaaaatgcatctgaatcagaatgataaaaaggggatacaggttatattttatcctgtatcccctaaaccgggtatcctcacctacacaatggaatttctcagcacttcggccataaaaaggtcctcaggcgtcgtaatcttaatattggcataactgcccattaccatatgcgccttcacccccatctgcgcctccaccaccatggcgtcatccgttatgccggtgcagtcctccttcatctggcgggtaaatgcctccacaatcaggggcacggaaaagacctggggtgtctgtgcctgccataccatgctgcggtccgggctggactcaatcattccctcccggttcaccagcttgatggtatcctttacgggcatgcccaccacgcaggcattgcatttgcacactgccctgtatgcccgttcaatgatttcgccggtgacaaaggggcgggccccgtcatggataaacacgtatccatcctgtctgtccctggcaacggattccttctccccctcttcccggtccataagggtacagagcgccttccatacgctctcgtaccgctcgccgcctccggcgcctatggtactcaccttcttcaggccatacgcctccacgatctctgttctcacatattccatatgccctgcatctgtcatgagtatgatttcatctatcacaggagaggcttcaaacacctccagcgcataggccaccagcggcttgccgccgatttccatgtactgctttgccgtattcccgcccatgcggctgcccttccctgctgccaggaccacagccgtacaatatttcttttccattgcagacctcttctttcgtccttcccggaccggagtccatttgttccttacatccccgccgactgtacgctccgacctaattttcaaatttcagacaggctctagcgttcacccagcttcagattgggaatggcattcaaatcccacccggatatatttccctttaaatattcatagtaggcagccgtcccgatcatggctgcattgtccgtacagaaaataggggacggataatagaactgaatcccgtccttctcacaggcttctgccatggcctttctcagcgcggagttggaggcaacaccgccggctatggccagcttcttatatccaaattcatgggctgccagtatggcgcggcttaccagagactccaccacggaattctggaatgaggccaccaggtcaggcacattgatttcttccccggtcatacgggcgtggttgatgtggttcagtacagctgactttagtccgctgaagctgaaatcatagggagccccctccaccttgcccctggggaactggatggcatggggattcccctcttttgcagccttatcgatcttaggcccgccgggatatcccaggcccacggaccttgccaccttgtcaaacgcctctccggccgcatcgtccctggtcctgccgatgatttcaaattccccgtagtcctttacaatcaccagatgtgtatggcctcccgacacaatgagacaaacgaaaggcggttccaaatcctggttctcaataaaattagcggaaacatgcccttctatatggtgcactccaatcagaggctttcctgctgcatatgcaatggcctttgcctctgcaacccccaccaaaagagcgcctaccagaccgggtccgtaggtcacaccgattgccgtaatatccttcagagccacctgcgcttctgccagggctctctcaatcacataattgaccgcctttatatgctcccgggaagctatctccggaaccacgcctccataaaccgtatgggtggcaatctgggatgaaattacattggacagcacggtccttccgtttttcaccactgccgcggccgtctcgtcgcatgagctttcaattgccagtatcaaaacatcctctgatgcctgtcctatcatagtattctctccacttccacgtatcctccggtacctcgtaccgcgctatcagtcctcatcaaattccagctccgctgtccatccgtccctggcagcctttgcccttgggaaaatcgttctgacttcctccatatactcctcgggcttggtaagggaggggctgtaatgggtaagccacatctgttttggattagcctgctttgcaagggccgccgcttcataaaacgtcatatgcttatattccctggccttggctgctttttctttttccccgtacattccctcgcagataaaaaggtctgccccggctgcatactctgcaatcaccggcaccggcctggtatctgtgcagtatgtcaccttaagccctctgcggtccggccccagcaccatatccggcgtcaaaagccgtccctcatgctctatctcctcgcccttttgcagcctgctccagaatttctggggaatctccttagacctggccctctccacgtcaaaacgtccggtacgggggatggtgatggaatagccgtaacacagcacattgtggtttaccctgtaagcatctatcacataagggcccatctgcatgcgttcccggttctccgtaagctccacaaagcgcagttcaaagggcagttccggcgcaatggtgcgcagcgctcccaccacccgttccagccccttgggaccaatcagggtcagcggctccacccgctccgcattgcccatggtaagtaaaagaccgggaaggccgcttatatggtccgcgtgataatgtgtaaagcaaatgatatctatgggcttgggactccatcccttttccttcagggccacctgggtcccctcaccgcagtcaataagcagattgctgcccgagcaccttgccatcatggatgtgagccagcggtacggaaggggcatcatgcctcctgttcctaacaaacatatatccaacatactgtaatcctcattctctcaatatcttaactcacaaaatcatatcacactttcctcttaataatcaagtatcgccggaaaataacatggcagacacaaaaagtcaggcgcttaagtcagacgtcaaaaaggagctgccgcagcagctcccatatttatctgtaacagttacatttatcttatataaatcctgtcccgcgaaaggctggatgccgtcctacaccagatggaggggaatatccttctcagcgatgagctcctgccattcccggctcagcccgtcatccgtgacgatttcatcaatctcttccagttcagcaaaatatcccggccttacctggccgaacttgctgctgtccgccaccagtatcttctgcagggatgattccagggccgccttttttgtaaccacctcataattatgcgcgcaggtcatgcccagcttttcatggacaccggaggcagaaacaaacatcttgctggcccttgtcctccgtataagcccgattccctcaacgctctcaaacatcaggtcgttccggtggaaatatccgccggcaaaaatcagggaaagcttctcattaccctgaagctgggacaggatatggtaattatagcagagcactgtgagctgcgtctgttccggtatatatttggacaacacgcctgtggtggttcccgaatccagaatcaggatatccccctcctcaatcatccccgccgcaaaccgggcgattctgtcctttttatcaaaattgcggatctgctccgaagagtacagatattcgtcgtgttcccgcgctgccggctcagaagccttattttcgtaaaacagacggttttctttgagataatcaatatcacggcggatggtcatttccgagacctgaaagcggtctgccagctccttaattgataatacgggcgattccttcagtgtatccaaaagcgcgtaaatcctgagatccctttttcccataagttctgtttcccctcctgtcgcaatcctgctgcggcccatgggtgcacagcgttacgaatctgactgtaaaatattataattgtattttcagaaaatgtccagatgttcctggccgtgctaaaatgttatatattgtttgtaaaatgttacatctgcatttaatttaacattttttgataatttatcttgattttcgtattctaaaatgctaatatatgctcgtagtaacactaattaacatttttaccaatatggaggccaaaatatgagaacaattgtaattgggtgcgacaatgctgctgtacatttgaaaaatgaactcatgggattcatggagaaaaagggatatactgtggagaatatgggatgcgacagcactgaggattctacctattatccctatgtggcagagaaggtgtgccaggaaatcataaacagcggttatcagaagcacggtgtgctgatctgcggcacaggcctgggcatggccatgactgccaacaaattcaaaggcatccgcgccggcgtatgccatgatgttttctcagcggaacgtttaaaactgagcaatgacggcaatgtgatctgtatgggcgagcgggtgattggagccgagctggcaaagcggattctggaaaaatggctggaactggaattcgtagactgtgcatccacatccaaggtagaggccatcaaagaaattgaaggcgaaaatctcaaatagcggaggcggcttgatgaaaaaactgaatcggttatatcttggcacaaacacaaagatgtacaaaaccattgcggaaacaacttcatttctgacacagctccgccgactgacagaggacctggcagacagccccctcaccctgtttgtcatcccctccttcaccaccctggagtccgccaacaggattacatccggatcccacatccggctgggagcccagaacatgtgctgggaggaccagggacagttcaccggcgaaatctcgcctgtcatgcttaaggaagtgggggtaagcgtagtggaaatcggccactcggaacgacgccacgttttcagggagaatgactttgaccaggaaaaaaagacagcaaaggcagcccagtccggtttcactcctctgctgtgtataggagagaccctgacccagagggaatacggcctaagcggggagaccctgagcacccagttaaaggtggggcttcattccatcaccgcagaacaggcggagcagctctggattgcctacgaacccgtgtgggccatcggtgtgaacggcatccccgcggacagtgattatgtggctgagcgccatgcaggcatacggcggattctgtgcgcacgctttggcgaggaacagggaagccgcatccccattctttacggcggcagcgtgaatccccaaaacgctcaggagctgattgcgctaccggatgtagacggcctctttattggacgcagtgcctgggacgcctctcagttcaaccgcatcatacgccaggtcatgcctttatacatgaataaatagcaggagggaaatcatcaatgcacaatctgcttgtggcccagtccggcggccccacatccgcaatcaacgccaccctgtccggagtcatcacagaagccatgattcagggcggcattgaccggatatatgggggactcaacggcattgaaggcattttacaggaaaaaataatagatttgctggatcatatcaataacacaatggacctggacaaactggcccaaacccctgctgccgccctgggttcctgccgcttcaagctggccgggccggaagaggatactgcccagtaccgggttctgattgatattttccgtaaatatgatatctcctatttcatatacataggcgggaatgactccatggacacagtggataagctggccaggtactgccgttcccaacagattgaggatataaaaatcatcggcgcgccaaagaccattgacaatgacctgatggaaatcgaccactgccctggttttgcctcagcggccaagtatattgccaccaccttcgcagaactggagagggatgtggctgtctatgattccttcggagtcaccattgtggaaatcatgggacgcaacgccggatggctcaccgccgcctcgtccctttccagggtaaacggcaaccgcgggcctgattttatttacctctgcgaagtgcccttttccatcagccggtttctggacgacatacgaagccgccagtctgaaaacaggaatctgctgattgctgtcagcgagggcatccgggatgaaaatgggacctatctgtctgaacagactcccggcaaccgtcccgaccggttcggccacagggatattgcaggaaccggaggcgtcctggcccagattgtccgcaatgagctgggatgcaagacccgttccctggagctcaatctcatgcagcgctgcgccgctcatctggccagccgcacggatttaaacgaatcccggcttctgggagcaaaggcggttcagtgcgcagtccagggacagaccggaaaaatggcaaccctgctgcgcctgccctcaaaggaccgttaccggattcagtttgcctccgcggacgtgtctctggtggcaaaccgtgaaaagacagtaccccgccagtggattaaccgggaaggcaacggcattacccgggaaatgacggattacctgacgccccttatggagggagaggtaccggtgctgtaccggaaccgctttcctgaatatttcaccatatcccttgaataagagccaggagcacatatataaagccagggacacttatataaagccagggatacatatataaagccagggatacatattaaggagaaccgcgttggcagttctccttatcccatcctacagaaattcaatctgttcttccctgtccacaggtatcttgaagccggaaaccagttcatcataacattcttcacacaaatcaaaatgatggacctgtccgtccttctcagaaaaataatcccatgcatggtcaatactgatacatccctcccggatgattccatgctgcaccaccagcttttttccgcagcaattgcacattattgtttccagctgtccatttttattgtaccttttcatatgaaccctcgcctttctctgtcatcgtatcctttcattcattcccttatcttccccttaaagaaaaaaggagaggaatgtccggttcctctccattatatacataaaatattcacattttaagtggtaattctttcatattgcccggttccacatgatgatggcatcctcggccggattatggtaatatcctttcctcacagcctcctgcctgaaaccataggaatcatacaggtttctggctcccaggttgctctcccggacctccagggcaatggcccggacccctctggccctggcaaaagtcaccatggcatccatgagtttccgtgcgattccctgacgtctgtaatggggatataccccaatccgctgtatctccccctcgtctgccagaatccgcagaaccgcatatccaagtatggttccgtggtcagcatagacaaaatacgtatccagcctgctgtccaggcccatgcgtatcagattctcagaccagctctccgaaaagcatacctgctccaaatccgccacctgctcaatgtcctggcccgtcatggggcgaaccccgcgaatcagctccatttccctgctcctttctgtttccgcagcagcccatgccttgaatcagaccatgtatcagttccttgtgtctgctgcccttaataatctcccggaagctttgcggccgcccccagggcagactgctccgcctctctctggcgttcagcctggggctttctcagataatccggcgtaaactgcgccgccgtcaccacccggacgcccgggcagccctctgcatccaaaagcgcgttcatccccagggcagccacggaggcagccctctgccggttcatctgagccggtgcaaaggcatggggtacggtcagcatttccctgattatatctttatatacaggtacaccgtctcccagaaatatggtccgctctccttttttattgagaagtcctgccagctccctcatatccatgggctgctgctccatcaccacctccaggccgtccctggtatggtatagccccgtatagacctggctgcgttttgcgtccataataggacagataagcccctctgccccccacatattatatgccatggcatccacggtaggaacatggaccaagggctttttcagagccagccccagtccctttgctgtggcggcacctatgcgcagcccggtaaaagaacccggaccgccggccaccgctatggcgtcaatggtatccatatccagctccagaagctttactatctcatccagcataggaagcagggtctgtgaatgggtctttttaaaatccactgtatactctgctgtcaatatgtcatctgtcaccagggccacgctggccaccagggatgaactctctattcctaatactctcatcctctatcctccacgctaatccgcctgtaatcaaatcccttttccagatccttttcaatggtcacccaggtcaccttctcaggcagtatctcctcaatcaggcccggccactcgatgaggcagacgccgtccccaaagaaacagtcctcataaccgatttcgtccatttcactcacatcaccgatacggtacacgtcaaaatggtacagcggaagccgaccgtcctcatattgctgcaaaatcgtaaaggtggggctgttcaccggcccctctatgcccagacccgcggcaaatccctgcgtaaacacagtctttcccacacccaaatcaccgctcaggcagacaatctgtcccggctccgcttcccttcccatctttcttcccagctcatatgtttcttccggtttccgcgtctcgattaccatttcctacctctttcatccttactttacgcccttcatggtcagtgaaatcctcttcttggccaaatccacgctcaaaatctttacatccacgatatcgcccacactgacagcctccagcgggtgcttgatgtacttgtctgtcatctgggagatatgtaccaggccgtcctgatgaacgccgatatccacaaaagcgccaaaatcaatgacgttgcgcacggttccctttagcaccattcccggctccagatccttcatctccagaatatcgcttctgagaatgggccttggcatctcatccctggggtccctggcaggcttttccagctctccggcaatatctctcagggtaatctctcctatacccagatcctgcgccgtcctcttataatcctttatcttccggctgattcccagaagtcctcctccggacagttcctcaggcttatagcccagcttttccaggagcttcccggctgcgtcatagctctccgggtggacgctggttccgtccagaggattctctcccccggtaatgcgcataaagcccgcgcactgctcaaatgcctttggtcccagcttggccacctttaacagctgcttcctgctcttaaatgccccgttctcttccctataggccacaatgttcttggccaatgttttattgatgccggacacatattccaacagggaggctgatgctgtattcagatccactcccaccttgttcacgcagtcctccaccacgccttccagcgcctcgcccagacgtttctggttcatatcatgctggtactggcccacgccgatggacttggggtcaattttcaccagctcagacagcgggtcctggagacgtctggcaatggataccgcgctcctctggcccacgtcaaaggccggaaattcctcggtggccagcttgctggcagagtacacggatgctcctgcctcgtttacaatcacgtactggacctgttccctgatttccttcagcaaatccacaataatctgctctgattccctggatgctgtgccgttgcccacggatataagggaaatattatactttttaatgaaatccttcagtattttcctggattcctccaccttgttctgaggcgctgtggggtaaatgaccaccgtatccagcacctttcccgtgctgtccaccaccgccagcttgcagccggtacggaaagccggatcccagcccaaaaccacccgtcccacgataggaggctgcatcagaagctgttccaggttctttccaaataccttgatggcgccttcctctgctttttccgtcaaatcgcttctgatctcccgctctatggaagggccgatgaggcggctgtagctgtcggctacagcttctttaaggattggcgtggtatatgggttgtccctgacaatggtctgcttttccagatatcccagaatctgctcctcaggagccagaatcttcacagtcagcattttttcattctcgccccggttcagggccaggatgcggtggccggcggccttcttcacaggctcctcataattataatacatctcatagacagactgggccttctcatccttggctgaggactggataacgcccttgttcatggttatatttctgatataggtgcggaaagccgcgttatctgaaatacgctctgccagtatgtccctggctccctgtatggcctcctggacactggccacgcctttttcctccgatacaaaaccggctgccgccttctcaacaggctcagctgtcatctgcatgctgataaggtcggccaggggctccagccccttttccttggcaatcatggcccttgtcctgcgtttgggcttgtaagggcggtaaaggtcctccacagccaccagggtctgggcctcctttatcttaagctccagctccggggtcagcttctcctgctccgcaatggaggcaatgacctggctcttgcggtcttccaggttgcgcaggtattttaaccgctcatccagattacgcagtacctcgtcgtttaaggagccggttgcctccttccggtatctggcaatgaacggaatcgtatttccctcatcaatgagtttgacggctgcttccgcctgatggcgtccgatattcagttcttccgccagttttttaataatatccatggtaaacctcgcatatctgtaatctaactaactgttatattatagtgcatcccaaccgcttatgcaagttctggccgaaagttccccgcatatggaaagcttcttcatctggacagtgccggtaattcgtgataaaatagccaggatagcagttacaatatttcggcacggcagaaacggccgcgcctgacaaaagaaaggtccttattcagaatgatgaatgatactcataacaaccagaaaccgccttccaacaaacagggaaagaacttcacgtcctccgagcgcctgggcacctgttccatgatagcaggcattatcggaatcgtgtgcagccttttctatctgcccatgtcactggcctataaccagaccgccatgcccacaggccttgtctgcggcgtcatcggcatcctccttgccctcatggccagaaacgccgatatgagccccaggaaagcctttaatgccagggccattgcagggctggtgttaagcgtcattgccatcacccttacatttttctttttctatgccctggccagctactatgaggctctaagcgaccctgtgaccggtcctcagattaatgagttcatcaaccgtctccaggaacagctgaaccagcagatgcagctgcccaaaaccaccggctttatctggttttagtgcctgctccgtccccattgacgccggtttccattctattgctgccggttctcccttcgttcatccggctcagcgcggccagagcggaagcaggtccacgcctcttaccaccagcatatagttcttgtacacccagttcgccagcgcaatggctgcaccggtgtagaccagaaatttctcatgccccagataatatctggggttttttgctgccctggacaccccgaagcttaccagctcagccgtcagcaccactgccatataggcaaccagggggtggtaccggatgctcaggagcagattgcccgcaagcagcgcccggaacgctctggtgccgccgcagcccggacagtaaagtcctgttaaaagatgaaacaggcagggaaatccctgccttgtaatcacaccgataatccggcttataaccgatgccatatgctacagcaccgcacgtatcatctgcttgataccgtattcagaccgctcccgttccctggcgtcataggaaacagcccctttcttaaattctccctccgtcatctgggcggtgaggaaagcaaattcatccattccgtagagctcgattacctccacctggccaaaggcgctcttgacatcctgctccttattgcggtaggaaccagccaccctgacaaagtacctgaactgtgcctggtccatggattcaatggcctgtttttccccggtccagcccatgggcacgttccttttaagattctgggccgcttcaatgatatcagccaccaccgcgctgcctgtgggaagctttccggcgccgctgccgtagaacatggaggtccccagcatattgccctttactaagataccgttaaatacatcatttacagagtacaggggactggtcttattgatcatcaccggagccacataggccagaaccctgccgtcctttatacggctggttccgaacagcttcaccgatgtccccatcttctccgcgtatttaaagtcgatatccgtaatccgcgtaatgccctcggtgtaaatatcctcataatccacttcttttcctgttgccatggctgtgagaatggcaatcttacggcaggtgtcatggccttccacatccgcctccggattgcgctctgcatatcccaggttctgggcttccttcagggcattttcaaaggattccccctctttgtccatcttggtcaggataaagttggtggttccgtttaatatgcctgtgatttcctcaatgcgctctcccatgagacagcggtaaagaggacggataatagggatacctcctcccacgctggcctcaaaaaagaaattcacattctttctcctggcaatcgccagaagctccgtgccatgggctgccacaagggccttattggaggtgaccacatgcttgccggccataaggcaggccttcacgaatggataagcgggattcagtccgcccattgtctccaccacaatcttcacttcctcgtcctgctgaatcaccttgaaatcatggacaatcttgtctgccaccggactgtcctggaactcccttaaatccagaacatactttaactccacttcctgtcctgcctggcctgctataacatccctgttcttgtcaaggatctcggccacgccggaaccaatggtaccataccccataactgctgtcttaatcataatcttccgctccctgtgttttattctcctctgatactaaaaggcacaacccggtcattactccctggcaagtattttgacgtaatggattccgtccaatacttccagttcctctatcatgctggatacattgcctgtattctcccttacctccacgctcagcgtaagcgttgccacgccgttgaccggaatgctctggtgaatagtcagtatgttggccctgtacacagccaccacgtgaagcaggtcactgagaagtccctgttcatcgtccatctgcaccaccagggtaatagttttccccttggtgttgtcatagaagggaaatatgtcatccttgtacttataaaaagaactccggctgattcccaccttatccgtggcttcctgtaccgtaatggcccgttctgtctccagaagcttcttggcctctacaaccttcaaaagaacctccggcacggctttctgcttcaccacaaagtatttgcttttgtcttccattgtccaatcctttcgtaggtccggtgtatgtccgcattggaaatacatctgtactcatgaggaagatattaacacatttttattttaaatgcaactgtttttctctaattttacttgatatacagagaatgagggatacacaaaggaccggaattttccggtcccctgcgcattggttctattcttatgcctcatcttcccttacattcttatccgggcatcccagactcatccagcgaagataggcgctgataaaattatcaattgccccgtctaacacagcgtccacattaccgctctcctcgcctgtacgatggtctttgaccatggtatagggctgcagcacataggaacgtatctggcttccccatccgatgtccttcacatccccgcggatgcctgctgccttggccgcctgttcctcctgttttaccataaggagctttgccttcagcatctgcatggccttctccttgttctggaactgggaacgctcattctggcaggtcaccacgataccagttggaaaatgggtaatccggatggctgaggacgtcttgttgatgtgctgtccgccggcgccgctggatcggtaggtgtccacgcggatatcgtcgggattcacctcaatatctatgtcctcctcaatattgggcataacgtcgcaggacacaaaggaggtctggcgtttgcccgcggaattaaagggcgatatacgcaccagacggtgcaccccgtgctcagaacgcagatatccgtatgcattctcaccgtcaatctgcacggtgacagatttgattcccgcttcctcaccgtccaggaaatccagcacatgggccttaaagcccttgctctcagcccagcggcagtacatgcggtaaagtatgctgcaccagtcacaggactcggttccgcccgcccctgcgttcaggcgcaggatggcattattggaatcatattcccctgagagcagaagcttcatccgcatattctccagggtttccttaaactgttccagcatctcctcaatctcaggaatcagggaggaatcattttcctcgtatcccatctgaatcattacctggatatcctcatactgctgttccaatgcccggtaggtgtccacctcatccttcaggttcttggactcccttaccatcctggtggactgttccggctcgtcccagaaaccaggctcctccatggacttatctaattccgcgattcttctgaccttgttgtccaggtcaaagtgaatccctcacttccactaatggtttgtcatacgtcgataacgtatacttaaaattgtctaactctaccacagcttcacccactttcaatctatattttgtgagcccctgttcagggctgtttcatggttatatgcagccattttcataaaggccggtgttcagatgatatcacaccggccctggtaatacgtcgattatttaattcttccgtggcactgtttgtacttcttgccggaaccgcatgggcatgggtcgttggggtatattttctgctctgcacgcttcttgggagcgcttggggcagatgcgtccttattggtgccggtcaccttggcagccgcttcacgctctaccttctgctctacacggatatggaacagaatccggattgtctcctcctggatggaagccatcatggattcgtacatctcgtaaccctgcatcttatattcaaccaccggatccctctggccgtatgcctgaaggccgataccctcacgcagtgcgtccatatcgtccagatgcgccatccatttgttgtcaattaccttcagcagaaccacgcgttcaatctcacgaatctgctcaggctcagggaactcagcttcctttgtctcgtaaagcttgatggcctcttccttcagattgtgcttaagctcattctttttcatggacttcttctgttcgtcggaaagagttaccggcttcagaggaatgaccgggagaaggaggttgttcagttcctgtaaatcccacttatccggagtctggtcatcggacacggagatatccactgcattctccactgtatccgtaatcatcttgagtacaagatcgcgcatgttgtcgccgtccagcaccttgcggcgctctgcgtagataacctcgcgctgctcattgttgacctcgtcaaatttaaggagctgctcacggataccgtagttgttgctctctatcttcatctgtgccttctcgatggcattagacagcatcttatgctcaatctgctctccctcaggcacacccatggcctcaaacatagccataagacggtctgaaccaaagagccttaaaagatcatcctccagggacaggtaaaacctggactcacccgggtctccctgacgtcctgaacgtccgcgcagctggttgtcgatacggcgtgactcatggcgctccgtaccgataatcttaagaccgcccagtgccttggtctcctcgtccagcttaatatccgtaccacggccagccatgttggtggcaatggtaacagaaccgtggatacctgcatctgctacgatttcggcctccagctcatggaacttggcattcagcactttatggggaattccctttttagtcagcatcttgctcagaagctcggaagtctcaatggcaatggtacccaccagaacaggctgtcccttctcatgtgctttctccacctcatccacaactgctttgtatttttctttctttgtcttatatacagcatcctccaggtccttacgaatcataggcctgttggtggggatgacgataacgtccatggcatagatgttgcggaactctttttcctcggtctgggcagtacctgtcataccggccttcttggtgtacttgttgaagaagttctggaatgttacggtagccagggtacgggactcgcggcgcacatttacatgctcctttgcctcgattgcctgatggagtccgtcggaataacggcggccgggcataatacggcccgtaaattcatctacgatcaggacctcgtcatcctttacaacataatccttatccctgaacatcaggttgttggcgcgcagagccaggataatgttatgctgaatctccagattctcaggatctgccaggttttcaatatggaagtactcctccaccttcttgacgccctgttctgtcaggttgaccactttatccttttcatccacaacgaaatcgcctgtctcctcaatctcctcgcccatgatggcgtcaatcttggagaactccttggacacagtgcccctctccagctggcgggccagtacatcgcacacctcatagagcttagtggatttgccgctctggcctgaaataataagaggcgttctggcctcgtcaatcagaacggagtcaacctcatcaataatacagtagtccagatcccgcagcaccagctgctctttgtagatggacatgttgtcacgcaggtaatcgaatcccagctcattatttgtgacgtaagtaatgtcgcaggcatatgcctccttacgctgttcgcttgtcatgtcgttcagtacaacgcccacggtcatgcccaggaatctgtggacctgacccatccactcagcatcacgctttgccagatagtcattgaccgttacgatctgaacgccttttccctttaatgcattcaggtatgcgggacaggtggataccagcgtcttaccttcaccagtacgcatctctgcaatacggccctgatgcagtacgataccgccaatcagctgtactgggaaatgctccatattcagagttcttcttgccgcctcacggactgtggcaaatgcctccggcagaacgtcatccaaagtggcgccatctgcaagcctttctctaaagattctggtctggtcacgcagttcctcatccgacatggccatcatctcgggacgcagtgattcaatctttgtcacgattggccttatcatcttcagttctctttcactgtgagtcccgaacaccttttcaatcaagttcatggtatactctcctaacttcttcctatataatagaaactaattttcaaccagcgcctgtatctgcagcatctgccctaccatctattatctgcctgctgattcctgtctattccttacctttcgcaatgcctttcattgcggacctttcagataaaatactacaaatactacgcctatgatacaatcttacttattgtagcacttgggaaagattaattcaacgggttcatgaaaaattaacattttgtccatatacgttcctgctttgaatctattttccccaaacttatggtcaaccaagcagattgcacaaaaaatgtgttcgattttttacctgtccacattatccccagaagtttatacacattacccccaaagttatccacatcccagtttgtccattttaaggcaaaaaatagttatacaccaacttatccacattatccacaagtttataacttttcatctgtgcctcccattcagactttataattattttatttttgtacacttctgataaacttgataagtacggaagaaaaaacaaggttttctcttgacatttcagggagtctgctattaggaatgcaatagtcttttaccgcatttgaaacaaatttttataaaaaattaagataaattgttaaacaattcttaggttctaattgtaattttgcaataaatatgatataatgtcactatcccaagaaaaggagttgatgtttatgcgttataccataacaggacgaaatattgaggtaactccaggtttgaaggctgccgttgaaaagaagattggcaagctggaacatttcttcacgccggacaccgaagtaatcgtagcgcttagcgcacagaaagaccgacaaaaaatcgaggtgactatcccagtcaaaggcaataccatccgcgcggaggaatccagcactgatatgtatgtatccattgatctggtagaggaaatcattgagcgccagatccgcagatatagaaagaaactcattgataagaaacaggccgccatctctttctcccaggccttcatagaggaagaggacgaagtacaggatgacgagattcagattgtcaagacaaagaaatttgccatcaagccaaccattcccgaggaagcatgcctccagatggagatgctgggacacaatttctacgtgttcctgaacgcggatacagaccaggtgaacgtggtctataagcgtaagaacggaacttacggactgattgagccggagttctaaaccacggattgaaaccaaatatttttcttataataagtacaagcccgcaaatctgcgggcttgcttttatatgtagaaataattctcttaatccaaaaacgtaacagccttacagggtgtcctgtaatttgccggcgtgatgcagatacccgtggtggggttgctggcgtggataacctggccgccgccgatgtagatggccacatggttaatgtaatcgccactggcatagaacagcaaatctcccggcttggcatcactgactggtatggactttcctctggcagcctggtccctggagcttcttcccgtactgatgccgaaatgggcaaatacgctctgagtaaatccggaacagtcagctccgcttgtcaggcttgtcccgccgtacacatagggattgcccaggaactgttttgcgtatgccaccactgcgttacgggtagcagaagccacctctgtggaggttccgccaggtgatcccggccccttgctgtccactgtctcaggtgcttttgccgttgtgggcgctgccaccgtgctgtccttgccgttctcaggattggccgcgatggtggtgacggcgtctgttccctttgtctcctctttcttgggagctgtggtggcaggagcctccgtggtcttctcggcctttgtggtggctgccgttgtcttcttggccgcatctgccttcttcgcatcctccagagcctgcagggccttctccgcatcttccttgcgcttggcctcctctgccgccttggccttctcctcttccaccgatacagccttgttaaactccacactggtcttcatatattccttgaacacatatccttccaaatctgaatccacctgcaccttcaggaaatcaccttcctcgcccgtaaccacataatgggcgccctctgacagcagtgtcagtgtctttccttccatgtcaggactttgtctcagacgcaggctgggggtgcccactatggtgccataggtggttcccacctgcttggccctggattctgcctgctgtcctgtaacaaagtaatcagcttttatgtagccggtaacggaaccggactgaatcttgtaccatttgccgccctctccgtccaccgtgtccaggatggtggccgcgcaatcattgttaatcttgccggtgacaccgctgctggtattggcctctgtacggatgtttaccgtgccgtttatcttggacacggcaatgttgtcatacgccgaggactttggtttggacgcggtctcctgggcagtctttgccttaccggcgtctcctgacgcgctgccggactggccgcttgccttattgccgctgccctggccgctggcggaaccagcggctgtatttgactgggctgatttgttctgtatgttggaataggatgaagccagctgcttttccggctctgtattccctgcataataattattcagcgcaacggatatacccgccagagaagatcctgtctccaggtttgtggacgccatagcgttcacagaaagcgcgcagctgcacagaccgctgagcacgattactttcttccagttattcatctgtagcctgcctcccctaattctctaccagataccgctccacactggttatggcgtttgcaccgtccgcagcagctgtaataatctgacgaagcggcttggtcctcacatcgcctgccgcaaagataccaggtgccgatgtcacagtatcctccccggccctgatatagccgtggtccatatccaccaaaccctcaaaggccctgctctccggtgttatgcccactgcgataaacacgccctgtacatccagttctcttttctgtccattttttacattggtcagggaaagactctttaccattccatccccattgatactgtcggccactgtgtcccatattacctccacattatccagggacagcagattctcctgcaggctcttggctgcccgcagttcatttctcctgtgaatcagatacaccttgctgcacatacgcgccaggaaaatggcatcctccacagccacatcgccgcctccgatgactgccgtgaccttattgcggaaaaatgccccgtcgcaggtggcacagtaggacactccggctcctgccagctcttcctcgcccggcacgcccagcttcctgtgcacagctccggtggcaagtataagggacctggcctcataggtatttccctgacacaccacgcccttgattgcgccttttcctccatcctggatattcagaacctcgtcctccacgaaccgggctcccagacggtctgcgtgttccctgaatttaattcccaggtcgtatccgccgattccgggaagtccgggatagttgtccacctcataggtggtcaggacctggcctccgctgaccattgccttttctaccacaagagtgtccagctttgccctctgggcataaacagcagccgccagacctgccggtccggaaccgataataatcaaatcataaatatgagacatagtttcaccttttccttttattcgatctaagccgatattttcactgttttgtttcaatccacacccggtaatgaaacagagtacgactgtttgtttccggcaatgcatccatccgcctgttggggcgggggtattttagcttcttttgttaaacaatttgtaattattatatcacaaataaattatttattacaattcaatttcttacaattctatcattggtatggtaaaatatgttataacccataacagaaaggatgtgtatcttatgccgcgtaaaaccgtactggtcaccggagcctccagaggcatcggcaaggccgtggcagttaagtttgcaaagaagggctataatgtggctatcagctgtgtccacagggaggaacagctgatgcagacccggaaagaaatcgaatccttccaggtcccctgcctggcatacaaaggagatatgggggacatggcttgctgtgaggagctgttccttaagattaaaaagatgttcgggggcgtggatgtccttgtgaacaacgccggcatctcctatatcggacttctccaggatatgactccggcggactgggagcgcatgctgcgcaccaacctgacatctgttttcaattgctgcaagctggcggtcccctatatgatttctcagaagcagggaaaaattgtcaatatatcttctgtatggggcgttgtgggcgcctcctgcgagacagcctactcagccaccaaaggcggtatcaacgccctgacaaaggccctggcaaaggagctggcccccagcaatatccaggtcaatgcaattgcctgcggagccattgacacagagatgaaccagtggatggatgaggacgaccttatcgccctggtggacgagattccctccgggcgccttggccgcgctgaggaggtggctgatttggcttaccatctgggctataaggaatcctaccttaccggacagatcatcggactggacgggggatggatttagactggcggggtttggctgatgggtccaggccgggggatttagaccgggggcagactcccactatgcctcccgaacctttccgaaacttttccttatccttacgaatatattaactgtattgaccttggagccgctccatggtgtagaatttattcagaaaagcaatacactaatataaatcgcaaggaggcatgcttcttatgaaaaagaaatatttagcaatcgcagctctctccatggccctggccgcagggagcgctatgacatcatttgctgcgggattcgttcacacctctcagggaacaaagtatcagtggggttccggagattactgtaccaataactgggtaaattacaagaaccactggttcttcttcggagaggaccagattatgcgtaccggatggattcagaaggacggcacctggtattacgccgccgatacaggcgagctccagggcggcatcatgaagatcaacggcaatgtctactacttcgacagcaacagctgtaagttacagactggagaacgctccttcaatggccagacccacaccttcaccgaaaacggaaccaccgacggcggtccatatgtttatacagagtggaacagcaacggaacactcagacgcggtaccaaattcggggtacggtaattcataaattgcatatcacacacaagaacagggatgcctgagccggaaggttcagccatccctgttctaatgatatcaaaaacatagagagccaaaaagaccttccggaaaactggttccgaaaggtcctgtatacgtttgttgggacatactggtgtaaaccagatgtctgactccagaattaacgcttggagaactgaggagcacgacgggctgcctttaagccgtacttctttctctctttcattcttgggtctcttgttaagaaaccagctttcttcagggctggtctgtaatcagcgtctacctgaaggagagctctggagatgccgtgacggattgcgccggcctgtcctgttgtgccgccgccgcgaacgttaaccattacatcgaatttatcagtagtctcagtagctactaatggctggcgaacaataacctttaaagtctcaagaccaagatactcattgatatctctcttgttgatggtgatgttgccggtacctggtactaaatatactctggcgatggatttttttcttctgcctgttccgtaaaattttgcgttagccatgatactttcttcctccaatcctcattaaaatgttaaaacttctggtttctgtgctgcctgctcatggtctgggcctgcatatacatgaagcttgccaaacatgcttcttcccagaggtccctttggaagcatacccttaactgctaactcgataaccttctcaggcttcttagccatcaattcacgcagggttgtctctctcataccgcctacgtaatcagagtgattgtaataaatcttctgatccaacttcttgccggttactttaatcttctcagcgttcacaacgattacataatcgccgcaatccatatgaggtgtgaaaatcggcttgttctttcctcttaaaacctttgctatctctgaagacagacgtcctaatgtatatcctgtagcatcaactacataccattttctttcaattgtcgctggactagccataaaactcttcattggttaacctcctgttaatctcaaccttgttatacacctgacatccaacggatgcccgctatatgcctgataaatatgggaagtatttatcaatcaaagtgctcactccggggctttggatgagcattctttgctaatgtcacagttttatattatataataccaaacactccctgtcaaccactttacaaagaaaaaatgccgaataatcaaagatattccggcatttacagctcatatttcatttctatcagagtgagccccctggcaggcgccgtggggcctgctgcccgccggtcctttgcctccagaatggagggcatatcctctgcctgtatatggcctgttcccacagccatcagggtcccggcaatgatgcgcaccatattatacagaaaaccgtttccggtcacgcgtatggtaatgatatcatccgcatttctcgtaacatcaatcctatagacggtccttactgtatccgtcacctgggtgcggacactgcagaagcttttaaaatcatgttccccggccagcatatttgcagcagcctgcatcctgtccacatccagcttataataacagaaatgggagtacaggcgctccatgggcatgttgattctccggtttaaaatcctgtattcatatgtcttgatgcaggtgcattttctgggatgccagtcagagggcacttcctcggatacctgaacccggatgtcctcaggaagcctctggtttaaggccatgcaaatcttatccggcggcatctggctttctgtgtcaaagacagccacattcccccttgcatggactcctgaatctgtcctgctggcacctataacctggatgggctccctcataagctgggtaagggcttcattcaaaacagattctatggtcactgcccccggctgtatctgccagccgtgatattgggtgccgtcataggcaaccacaagccgtattcgtttcattgatcctaccttcctgtttatgcagcacagtgctcattttaaagataaaccctggacgctataatgaccacaaaatacagggcatatatcatataggcgtcatgatccgcctggcggtactgcaggggtttcatctttgtgcggccgtcgccgccgcggtaacagcgggcttccatggccatggccaggtctgtggccctgcggaaggcggaaataaataacggcaccagaagaggcaccatggcctttgccttctgtatcagattgccggtctcaaagtcagctcccctggccatctgggccttcatgattttatcggtttcctccaccagaatagggatgaatctcagggcaatggacatcatcatggcaacctcatggaccggcaccctgaaccgtttcagaaagcccaggcccttttccagaccgtctgtcagctggttgggcgtggtggtcagcgtcatgatggatgagccaatcaccagatagataagcctcagccccataaaaaaggccatacgcacgccctcaaaggttatcttgaaaatccagaactttaccagtatgcgtccgtctgtcaggaacagattgaagctgacactgattaacagcagaatcatgatagccttcagccccctgagaatgaaacgcaccggcaccctggtcagcttaatcacagctgccagcaccaccgtggcaatgacataaccccatatattgtctgcaacaaacaaggaggctatgaacaccatagttccaaaaagctttgtcctggggtccagtctgtgaacggcggagtccaccggatagtactggcccaacgtaatctctctaaacatttttatccctgctgctttctgtcagtttattcctcagcgccagaatagcctccctagcctccgccactgtggtaatatcatcatcaatatcaatgccgttttccttcaggtcatggaccagataagttatctggggcgcagccagtcccatggtctccagttccctgtaatggcaaaatacctcctttggcgcgccgtcaaacaccttctgcccatggttcatcacaatcagacggtccgcatacctggccacatcctccatgctgtgggaaaccagtatgatggtcatatggcgctccctgtggagcctgtcaatctggtccagaatctcatcccttccccttggatccaggccggctgtcggctcgtccagtataaggacctccggttccatggccagcacgccagctatggccacccgccgtttctggccgccggacagctcaaagggagactgtttataataagaagggtccaggcccacctgttccagggctttttttgccctggcttcggcctcctccctgctcagtccctgatttttaggtccgaagcatacatctgtcagcacatccacttcaaagagctggtgctccggatactggaataccaggcccaccttgctcctcagctgcttcatgtcatagccctggctgtagatattctcctcgttgtagtagagttcgcctgcgctggcttttatcagcccgtttaaatgctgaatcagggtggactttcccgatcccgtatgtccaatcagacccacaaattccccgtcctcaatctccagattcacgtcaaacagggcatgctgctcaaaggccgtgccgccgccatatacaaaattcaaatcaactgcttttattgacatcctctatctccttctccctatctcagaaggggtaccagctgttccaccagctcttccctgctaaggattccatccgtaaggggcattcctgcctccttaagctcccaggccagctctgtgacctggggcacgtccagtccatggctcttcagttctttgaccctggagaaaatttcccttggctgtccgtccatgacaatcctgccgtcgtccatgacaatgattctgtcagcctcaatggcttcctccatatagtgggtaatcagcaggacggtgatgccttctgccctgtttaactcatgaatggtccgtataacctccttgcggccgttagggtccagcatggctgtgggctcgtccagaataatgcactccggcttcatggccataacgcctgctatggccaccctctgcttctgtcctcctgaaagcttattgggtgactggagccggtaggcggtcattccaacagccttcaggctctcctccacacgcttccatatctcttctgtgggcacgcctatattctccggtccaaagcccacatcctcctccacaatattgccgatgatctggttatccggattctggaacaccatgccggctgtcttgcggacatcccagatatgttcctcatccctggtatccatatcccccacccatacggttccttccgtgggcagcagaagaccgttgacatgcttggccagagttgacttgccggaaccattatggcccagcacagccacaaaatcacccttttttatatccacatccacaccgtcaatagcccggttcacttcttctatattttcttcctcatcgcgtcttatatactcatataccagttttgccgctttaacgattcccatatgcgtcctttcaacaccttcgttctgctacgtttctcaattttagttgatattactatataagtcaagagcagcggcgcaataatcccgttacaggcgccatggctgcagtccgaccgttcaccaggcactctaaagggcttctgtcatgagataccccctgctgcgcccattggtttctgcttacagtttcattatatttttttcccatgccaaaagcaactgttttccagtgacctgccccgggacggaatggaatatctgatggcgcaatgcagtacataacatccattatcatttctgttccggccggtgtgatttgctaatacatcagcaaatgccgtgcagaaagtaatgagcaacagacagcctgggatatacctccttaaaaggaaaacgaatccccgaagagctgcctctcttcggggattcgtttgtgttgtaatacacaataacatcttttcttatctgacaattcactgcacccaggccccgtcatctcccacataatacccgtccggtgtagtggtattgtaatacatggctccgtcgtctccgcagtaataccatctgccgccccagtcaatccagcccgttaccatgtatccggcggcattaaaaaaataccacctgtcatcaatatactgccagttatttaccgtatagctcttatccgcattgcagtaccaccagcccaccgaatccctgagccaggcgcctttgtaactggatgaggaggaaccgtatgtccttctgccgtcactgatttcatccgcctcctccgatgaaacataccaggaatcggactcctcccagcttcccttgtcggaggagctgtacacggcccttaccttaaacagatagtcaccgctttttgtaatataaccggaaaaatcataactggtatccgaggttgtaagtacggaggtaacggaattatcattacggtaaagccttacctcgtatttcctcgcgtccccgctgtcctcccacgaagccatgccgtcggattcatcccattccagcccgtagacatccaaatcatatccgctgtcactgccgtccagggaatccagagtaatgtatacgatcagggtgctgctctttctggtgaccgatgtaactttaccgtccgcccctcttaaatccacatcacttttagacagaccggaagaaaaatagtaatcatcctccgcctccaccgtaaccttcagctttggcttatcgccgtcatcccatccatttttaggttcattggttatctctatatcatccacgtaatagtcgccggaatcacaggtcacatccacgtctccggaactgtcgcccgcctcaatattggactccacatccagggatatactgtctatctctgtccttgtggatgccatggccgtcccgcacgtaagcatcagcagcgcccctgacatccaaatgactgcctgctgtttcagtctccccatatcacactctccctttcactgcaaaccataaactgtgcctctgcgtcaatgaatccaggccccgctgtcatctacctgaaagccgtccggtgtggtaactcccgccgccatagcgccgtcttcatacatgtaataccatgtatcctgaatctggttccatccggttacagcataaccttccgggttaaaatagtaccatttgcccatgatacgctcccacctgtctgctgctgcggtcccatcctcataggtaaaacgcctgccctcctggtaatcaccccaggtgccgtctgtaatgcccggtgtattggccccggaggtaagggaacttacagcttcaccatcctcaagataatcctgctggtttccgtttcttgcaatggcctggacctcaaaataatactgaaccccctcctttgtcataaatggtgaaaaatcgtactcggtactgccctccacaagctggcttaccacagacccctggtcatcatagagaacaacccggtaggtgttggcgtacttaacggcattccatctggcaagactggggtttgcactgtcccagccggcccaggcagtctctcccagctgcgccgcaacctggtacttaaatttcacctcatatacatttcccaaatctgattcatagtcctctcccgtatactttttcacggaggaaacctttgcttcatttcttccattggtcacacgaagctccagactgtccctgcccaggctccccgtgcagcccagatacagggttcctgtcacctcattgcctgcactccagttcaggggagccttggaccactccacatcggatgccagctccatcccatcagaggagccttcagacacttccacatccggttccaggggatgtaccctgtctttgtcattgtcgtccctgctggtgccgtctgtgtcgtactggttggtaatctccagcctatatgtggttttagcctgagcacttatgctcaggccaaataccatcaaacaaacggcagcagctgtaaaacaaaacctgcctcttttcatagtgtctcctttcaactatccttcctttatctatgaaaaatgccgtcatacttctttttcccgcaaatcactcacaaacctctttatcctaatgctgccatactccattggcgtctaactggaaaccgctgatggatgtgtttacagccttctgtccctgtcccggatagaagtagtaccaattatcctggaccttgtaccacccttccaccatggcgccgctttcgttcatgaaatacgtctttccgtcaatggtgagccagctgttcttgaccatggcgccttccggtccgtcctggttggggttcatatagtaccaaatattattggactttacccagcctgtcttcatatcgccgctttcacccagatagtaccatccgctgttggtctgcttccatcccgtcaccatcttgcctgtctcgtcgaacagataccatttatcattccatctcagccagccgtttttctggtagttgccgtcgggatatttaaaataccatgtgtcgccttccttgcgccatccaacgtccgtgtttcctccgctgggagtactgccgttgccgtcctcctgtccggtgccgtcagaaacctcgtcctcagcgatatataagtctcctgcttcggtccattcgctcttcttgccgcgcttcttttcctcctctgtgtggggaacggtccttaccttaaaggaataatcgccttccttggtcatgtaaggataaaaattataggatgttcccttatactcctccagcttcttaaccacggatgatccacggtacaaatacacgtcgtaatatccggaaccgccgttttccggttcctcccacctggctcttccccgggtgctgccccattccgcgtcttccggcgggtcgtaggtccccttgattccgtttgccctgattaccaccttaaggtcacttccgcttttggaagcagacacaaaagttccgccgctgacactgacgctgcctgaactgtagctgctgcggaaacggtaatcataattgctgttgctggaactctccggctccagccacacagttatctttggcgtatcgccaatggtcacttccttatcattggaccactctgctgactgaaccctgtatttgttcgatgaagtgtataccttgttcccgctgtcgctggaatctgttcccaggctgtcaccatcattgatttcatcccctgaatccaggtctatatccaccttcaaagagatgttcgtgatatacttataatcagatgatgccatggactggatgggcatagctgtaatcagcgtacccgtggccagggccagacataacaatcgcttcatgcttctcatgaaattcaacctcctccaaggattcccccttgctgcactttccttgtttcttcttttcctggttctattatagaccaggggacagttttgcgtcaacttacgatattcttgcgatattttcacgattatttcaggaactaaaaaaactgcagacacgattaccgtatctgcagccttctgcacgattcaatggaattatactaactcaatcagaacttccatagcgccatcacccttacgctggccaatcttaacgattctggtgtaaccaccattacggcctacgtactttggagcaacgtcgtcaaaaatcttagctaccaggtcaacagacttggtatttctcttctttcctgctgcggcagccggaacttcggtcactccgtagagaacctttaacatctgccttctggcatgcagtctggaaggcatatctttcttgatttccttctctacttcatcgtatacggtaaccttcttgccgtctacaacttccttaaccctcttgccgtctttgtccttgcgggcaaccttagcggtaacctttacagtctcgaagttatccttctccttaactgccatggcaatcagaccttctgcaaccttgcggatttcctttgcacgggtctcagttgtcctgatatgtccatgatataacagtgctgttacctggcttctgattaaagcctttctctgatcggaagttcttcctaattttctatatcctgccattgtattttcctccattatcgtggaacaccttcaccatgcttctttggacttactggtattggcgttttcgcccacttattctatttggctctctcagtcatgcttctttggacttactgaccgggagtaaagctccctcacttcgttcggtctgtgcgggaaacgcaaactccgcttcacttcgtctgcgcagcgctccctcactgtgttcggtcgcttagttgtcgtcgcttggatttagctgtaagcctaattcctttaacttggccagtacttcctctaaggacttgcggcctaagttacgaaccttcatcatgtcctcagaagtcctgttgcacagctcttccactgtgttgatgccggctctcttcagacagttgtaggaacgaacggaaagctccagttcgtcgatattcatctcaagcactttctctttctcattgtcttccttctctaccatgatctcagcggtcttggcattctcggaaaggtcaatgaacagattcaggtgctcgcttaatacctttgcggccaggctgacagcctcatcgggagccagggtgccgttggtataaatctcaagtgtaagcttatcgtagtccgtctgctgccccacacgtgtattggctaccgccatgttcacgcgctccacaggagtgtagatggaatcaactgctatgaccccgattggtaaatcgtcgttcttattcttatcggcgctgatatagccgcggcccttggtgatagtaagttccatatagaacttgctgtccgtgccgccgcttaaggtggcgataatctgatccggattcatgatctcgatatcagcatctgcctggatatcagctgcagtaattacaccttcgccttcaaattcaatgtatgcaaccttgggctcatcggtatcgctgttgttcttaatcgctaagcttttgatgttcataataatttcagtcacatcttccttaactccgggaatagaactgaactcatgcaaaacgccatcgatttttacctgactcactgcggctccgggtaaagaagaaagcataattcttcttaaggaattgcccagcgtagtgccgtaacctctctcaagtggttcaactacaaacttgccgtatctcttgtcttctgaaatctctgcgatttcaatgtttggtttttcaaaatcgaacactaatagcccctcctttttgggtttctatcaaatctcgagggaaataaagcactgcaaagcagtgcactgcccaaacacagcccaaggcgtaagttcgggtttttcatcctgcaaagtacgcctgccctataaaggacaggcataccttgtacaatttataatcaattgtaggattacttggagtacaactcgacgataagcatttcgtttactggaacatcaatctcatccctggttggcatttccttaacagtaccgcgcaggttctcctggtctacatccagccaagccggaaccatacgtccgccggttacttccaggacgtctttgtatctctgtgcggatttgtatttctccttcacttcgatgacatccccagccttaacacggtaggatggaatgttcactggcttgccgttaaccagaatgtgcttatggtcaacaatctgtcttgcttccttgcgtgtacggcccagacccatgcggaacagaacgttgtccagtctgcactctaacaggatcatcaggttagtacctaccataccgttcatcttggatgccttagcatagtaattacggaaaggtttctctaatacaccgtaaatgaatttggctttctgcttttctcttaactgcatgccgtattcacttaactttttgtttgttctcttggattctctgttggactttttatcaattcctaaatagattggatccagaccaagggatctacatcttttaagaacaggaactctatctactgccactttaattacctcctaattaaaatcaatcagactcttctacgttttggcggacggcatccgttatgtggaactggtgtcacgtccttaatgctggttacttccaatccacatgcctgaagggcacggattgctgcttcacgtcctgaaccaggaccctttaccataacgtctacggattttaagccatgtacgagagctgccttagtagcagtttctgccgccatctgggctgcatatggagtagattttcttgaacctctaaatccaagaccaccggcactagcccatgaaagagcgttaccctgcgcatcagttaatgtaacaattgtgttattaaaagatgactggatatgtgcctgtccgcgttcaacgtttttctttacacgcttttttgtcacttttttagctgtagtggacacttttttagccattttaaactaacctactttctcattttcttgaattcgctcttcctgtttttaaaacatgtaaatcgaattcggttacaatgttgctaatgaaattcttacttcttcttgtttgctactgtcttcctcggacccttgcaagttctggcgttggtctttgtcttctggccacgaaccggcaggctctttctatgacggattcctctgtagcatccaatttcctgaagtctcttgatgttcatagcaatctctctacgaagatcaccttcaacagtctgagtctcagcaattgtgttagccagcttttttacctcatcatcggttaaatccttaacgcgagtgtctgggttaacgccagctgccgttaagatgcggttggagcttgctctaccgataccgtagatgtaagtaagaccgatctcaacacgtttttctcttggtaagtcaacacctgaaatacgagccatgtgtgtagtacacctcctaattttaattaaccttgtctctgtttatgctttggattttcacaaattactctgatactgccttttctctttatgatcttgcatttttcgcagatcggctttacggatgatctaaccttcacagtaattctcctttctatagaccaacaaagttgctaaagcattatatcaaacatttgccaataatgcaagcacttttttatctatggtgttttatgttcttttccggggcaggcggtgtttgacatcactggcctgctggaaaacggaactctttctttactctgtctttattctgtcaccagacagcctgtttaccttatttatctctccagatgattcttcccttggataaatcatagggtgacagctcaatggtcactttatctcctggcaggatgcggatatagttcatacgaagctttccgctgatgtgtgccagtacctgatggccgttctccagttcaacctggaacatggcgttgggtaatttctcaattacggttccctcaatttcaattacgtctgcttttgacattctattttacctcctactgcctgcggctgcggatgaagcctgctatctcctcatccctcaccgccgcgccttctgtaagcttcttccttaaggtttcatcgtgctcatgtatgagctgcaagtgttttctgttcttgcgtttctgtttacttaaagggtgtttcctgccatctgacagataaacatattccccttggacactgattatgatatacagttcatttttgtcgtggcctgctaaactctttaccaggccggcttccttaaactctaccatagggccacctcaaactacagcgataaaatctcaggttcgccatccgtaatcaggatggtgttctcataatgggatgccagagaaccgtcctctgtcacaacggtccagccgtcatcctcccatactacatcatagcgccctgcagtaatcataggttcaattgcgagtgtcattccggcagccagcctgatgcctttacggcgctgggcgaaattgggaatctccggtgcttcatgcatctccgtaccgataccgtgacctaccaggtcccggaccactccgaagccaaagctttctgcatattcctgaatggctttggaaatatcattgagatgattgccagcttttgcatactttataccttcaaaaaagctctgctgcgtcacctctaccagtttcctggcctccccgctcacttctccaatcatatgggttctggctgcatcggactgatatcccttccatataacacctgtatccaggctgacgatatctccttcttccaaatagcggtgcttatccggaatgccgtgaaccacctcatcgttaatagatatacacacagatgccggaaaaccctgataattcagaaaggatggaacacatccatgacttcttatcatatcttcacacatccggtcgatttctttggtagacattcccggtaccagggtcctgccaagctcctcatgaaccttggcaagtatacgccctgcttcccgcattaattcaatttcccgttctgatttaatcgttaccattctttatgctcctaaaatcctgacaatggcctggaatacttcttccatatccaatgtgccatctacctcggctaaaacgcctgcctttttataatactctatgagaggctgggtctggtcatgatagacatcaagacgcttcttaacagtttcaggtttatcatcatccctaagtaccagctgctggccgcatacatcacagattccttcctttttaggaggattgtatacgatatgatatgttgccccgcaggaaaggcatgcgcggcgtccggacatacggtttatgatgttctcatccggaacatccacgttgattgcatagtcaatggcctcacccatgtcgcccagagcttttgcaaggctctctgcctggggaatggtccttgggaatccgtccagcacatatccgtttttgcagtcctcctcatggatgcggtccaacagcatgccgatggtgatttcatccggcacaagaccgcctgcatccatataggacttggctttcatgcccagctccgtgccgtttttaatgttggcccggaaaatgtccccggtagagatatggggaatctgatattttgctgcaatctttttagcctgagtgcccttgccggcaccaggtgcgcctaacatgataatcttcataaacccagtcctcctcgttatgagcacttagtggccgtattttggccgcttacgtgcgatacatgtcacctccacttggtgaggtcttccacgagccagtggagtggctcgttatgagcacttagtggccgtattccggccgcttacgtgcgatacatgtcacctccacttggtgaggtcttccacgagcctagtggagtggctcgttatgagcacttagccgccgtattccggccgcttgcgtgcaatacatgccactggcacttggcgaggtcccctcacgagcttagtgcagcggcgcgttataagctataaatacaacaaatccgcccctgtggaataccacaaaggcagattgattgattcaactgtggttgttaatcgttcaaaaatcccttataataacgcacaagcatctgagattctactgctttgattgtctcaagcacaacgccaacgataataatcagggacgttccggaaaatgagattcggctgacgttgagtaaaccggacgcaagaatcggaacaatcgcaatcactatcaggccgcatgcaccaataaaaacaatataattcaatatcttattcaaataatcgctggttggcttgccaggacgaatgcccgggataaagccaccctgcttcttcatgttattggccacttccaacgggttaaacgtaatggacgtatagaagtaagcgaacataatcagcaatgcaatataaatcaccagaccgatggagtatataggatactcaggcctgcaccatgaacccgaattgagcaccatcagaatcttactgccgatggagtttggatcaatcgtaaagaactgagaaatcaccaccgggaaggacatgatggaagaagcaaagattaccggcataacgcctgcggtatttatcttcagtgggatgttggaagcctgtccgccaaccatcttacggccaaccatcttcttggaatactggaccggaattctcctctcggcatcgttcagcacgataacgaaaactaccatagccaggataatcagggcaatcactacaacgctgaaaatcatctttgtaaccgtctgtccgaagataaagcggtaataaagagttttcatatcatccggcacactggacaggatgttgaataacagtacgattgagataccgtttccaacgcccttttccgtaatctgctcgccgatccacatgagcagggcactgcccgttgtcatggtgacgatggcgatgatgatgttccatgcgttataatctatcagaagtccctgacgtccgaagccgatggccatggcacttgattcaatcagtgccaggcccacggtggtatagcgggtgtattcctgaatcttctttcttccgtcctcgccatccttctgcagctcttccagttttggaattgcaatggtcagaagctggatgatgatggaagatgtgatgtatggcgtaatgctcagggcaaagatggacatggatgaaaatgaaccacctgtcatggcattaaagaagccaaacacatccgttgtctgtttcgcaaaccaattcgcaaagaacgatgtctcgattcccggaatcggcagctggctgccaaaacggatgactaccagcatcatgaaggtatagagaatcttagtgcgaagctcttttaccttgaatgcatttctgatcgttttaaacattagatcacctcgcaggttccacctaaagcttcgattttagattttgcaccttcactgaatgcattaaccttaacggtcagctttttggttaattctccatttccaaggatctttacaccatctcttgggttcttaacgattcctgcctcgattaaggtctcaaccgtaacctcagcatcattatcgaacctttccagagcgcttacgttaataccaataatggtcttagaattcatattagtgaaaccacgctttggcagacgtctgtataaaggcatctgtccgccttcaaagccaggccttgttgctccggaacgagctttctgacccttatggcccttacctgcggtcttaccattacctgaaccatggccacggccttttctaaaattatcgctatgctttgaacctgcagcaggctgtaaatttgacaactccatgactgcacctccttactctatatgattagacttcttcaacttttactaaatgccgcactgctgcgaccatgcctctgacagcgccattatctggcatttcaaccgtcttgtgcatcttggtcagtccaagagccttaaccgttgctttctgctttggaacagcaccgataggggacttgactaatgtgatttttaatttctctgccatgtctttctcctcctattagcctacgatttcttccacagatttgccgcgcagtcttgcgaattcttccggagtctttaaggaagtaaggcctgcaagagttgccagaactacatttgtcttgttgttggatcctaaggattttgtacggatgttcttgattcctgccatctccagtacggaacgtgccggaccgccggcgataacaccagtaccttcaggagctctctttaacagaacagctgcacttccgaatttaccgataaaatcatgtgggatactcttattctcatctacaggaatctctaccagattcttaattgcggcttctttacctttgcggatggcctccggaacctcgccggcctttcctaaacctgcgccaacgtggccgttgccatcgcctactactaccagagcggaaaatctcatggtacgtccacctttaacagtcttggatactctcttgattgccactaccttgtcattcagctccatctgactggcgtcaataattgtacgcttcatgcttgttctcctctctattagaaatccagaccagcctcgcgggctgcgtctgctaatgcctgaactttgccctgatatataaagccgcctctatcgaaaacaacttccttgatacctttttcaagggctctctttgcaataactgtacctacatatgctgcagctgccttatcgttggtcttctccagttcagcatttacttctttctcaactgtggaagcagcaaccagggtgttaccaaccgtatcgtcgataatttgagcatacatatgattattacttctaaacactgccagacgcggtctctctgctgtgccagcaaaacggttacgcattctgttgtgtttctttacgcgaatttcgcttcttgactgtttgttaaccatttttacactctccttaattatttcttaccagtcttaccaactttacgtctgataacctcgtcagcatacttgatacccttgcccttgtatggctcaggtcttctcttgtctctgatttcagcagcgtattggccaactttttctttactgatacctttaacgataatcttgttctgaccttccataacggtctcgatgccctctggatcttccatctctaccggatgggagtagcccaggttcagggtaagcttcttgccctgcttagcggccctgtaaccaacgccgtttacttcaagaaccttctcatacccttctgtaacaccatgaatcatgttgttaaccagggttctggtcagaccatgtaaagatttcatcttctttaaatcgtttggtctgcttactataatctgtccatctttctgctcgatggtcatttctacggggagctctctctctaatgttccctttggaccttttacagtcactttgtttccttctgcgattgtaacagtaactcctgccggaaccgcaactggcattctaccgatacgtgacatgcctttacctcctacttaaattctcggaaggaactgtgcgttccttctgttttcagtttcctctatctcatcattaccaaacaaatgccaatacttcgccgccaacacctaactgacgtgcttctttatctgtaatcacgccctggttggtggagatgatagcggtaccaagtccgcccagtaccttgggaagctcttccttgttagcgtatacacgcagacccggtttggagattctcttgataccggaaatgattttctcgttcttgtctttgccgtactttaaggtgattctgatggtctggaaaccgccgtcctctaccatgtcgtactttgcaacataaccctcttttaccaggatgtcagcgatagctattttcatcttggatgaaggtacgtctactgtatcatgttttgcagtgtttgcattacgaattcttgtaagcatatctgcaatcggatcgctcattgtcattttaaaatgcctccttcctaattctctctattttaccagctagctttcttaacgccaggaatctgacccttgtatgctaactcgcggaaacagatacggcagataccgtactttcttaaataagcatgtggacggccacagattctgcagcggttgtactctctggtggagaatttagccggacgctgctgtttaatcttcattgaagtcttagccatgaaagtttcctcctaactattttgcaaacggcatattgaataatgtcaaaagttcacgagcttcttcgtcagtcttagcggtggtaacgaagatgatatccatacctcttaccttgtcaactttgtcgtactcaatctcagggaagatcagctgctctttgataccgagcgcatagtttcctctgccatcaaatgcgttagggttaacacctctaaagtcacgtacacggggcagtgccaggtttaccagacggtcaaggaattcatacattctctcgccgcgcagtgttaccttgcagccgattgccatgccttcacggagcttaaagttagcaatggacttctttgccttggtggttatagccttctgtccggagatgatttccaaatcccttacagcagaatccagaaccttggcattttcctttgcttcgcctacgcccatgttgataacgatcttatcaagcttcggcacctgcataacgttcttatatccaaattttttcatcagagcgtctaccatctcgttctgatactgttcttttaatctagccaacgtttttttcctcctctcctgaattagtcgattactttgccggttgtcttagccacgcgaaccttcttgccgtctttttcttcaaatccgaccctggttgccttgccgtctactaccagcattacattggagatatcaataggagcttcctggttaacaatgccgccctgtgggttgcccggagcctgctttgtgtgcttggtaaccatgttgcagccctgaaccagaactttgttcttctttgtatcaacagagataacctttccctgcttatctttatctttacctgcgattacgactactaagtcgtccttcttaatcttattcacagtaacacctccttataatacttcgggagctaaggagacaatcttcatgaactgtttgtctcttaattctcttgctacaggcccaaagatacgagttcctcttggagtcttgtcatccttaataattactgctgcgttctcatcaaatctgatgtaagaaccgtctttacggcgtgcgcccttaacggtacgtaccactacagcctttacaacatcgcccttctttacaacaccgcctggtgttgcatctttaacggaagcaacgatgatatcaccgatatttgcatatcttctggttgaaccacctaatacacggatgcagagaagttcttttgcaccggtattgtcggcaactttaagtcttgtttcctgctgaaccatacctgttactccttcctcatctcattatctagctttctcgataatctcaacaagtctccatctcttatccttggacagtggtcttgtttccattacttttactgtatcaccgatggtgcactcattcttttcatcatgagcttttaacttcacggttttcttaacgatcttaccgattacaggatgttttacatggtcctcgatagcaactacgattgtcttatccatcttgttgctgaccactttaccggtacgggtctttctcaaatttctttccacggtaaatgtctcctttcgcattatgcgttagccttctcagtgataacagtctggatcctggcaatgttcttgcgaacttccttaatcctggatgtgttatccagctgattggttgcattctggaatcttaaattgaacagttccttcttcgcagctactaactcttcattcagctcatttgctgacttattctttaactcttctacaaatttattagttttcactgttatcaccgccttctaaatctgctttagaaacaatcttacacttgcatggcagcttgtgcatagcaagacgcagagcttctctagctgtttcctctggtacaccagcgatttcgaataatacacggcctggctttacaactgctacccagtactccagagcgcctttaccggaacccatacgggtttctgctggctttgctgttacaggtttatccgggaaaatcttaatccagactttaccgccacgcttgatgtaacgggtcatggccacacgggcagcctcaatctggtttgatttgatccaacatggttcagtggagactaaaccgtactcgccgttagaaatcgtgttgcctcttaatgccttgccggccatggaaccacggaactgcttacgacgcttaactctcttaggcattaacattatttatcgctcccttccttgtttcctttagtaggaagaacttcgcccttgtagatccatacctttacgccaatcttgccgtaggttgtatctgcttctgcgaaaccatagtcaatatctgctcttaatgtctgaagcgggatggtaccttcgctgtagaattcagtacgtgccatatcagctccacccaggcggcctgcaacagcagtcttgatgcccttaacgccagccttcatggttcttcccatggtggacttcattgcacggcggaaggaaacacggttttccagctgctgagcgatggactctgcaaccagctgtgcatccctgtccggacgcttgatttccttgatgtcgatgaacagcttcttatcagtcagcttctgaacttccttcttcagcttctcgatttcagaaccacccttaccgataaccacgcctggcttagcggtataaatgataatcttaaccctgtcagatgcacgctcaatttcaatcttggaaatgccggcactgaacagtctcttcttgaggaactttctcatattgtaatcttcaaccaggcagtcagcaaaatcagcttctgcataccacttggaatcccagtctttaataacaccgactcttaagccgtgtggattaactttctgtcccatatttgcctcctatctctcattcagaacaacagtgatgtggctcattctcttctcgatcctgtaagcacgtccctgagctctcggtctgactctcttcatggtcgggccctggttagcgtagcactcttcaacataaagttttgccgggtccattccgttattgttctcagcatttgctgctgctgattccagtaactttttgattaagctggaagcgtatctgggattgtaagttacaataccaagtgcggtctgtaaatctttgcctctgatggcatctaatacaaagcaagccttctggacagacactcttgcgtaagacagtgttgcgcttggtcttgtgtccttctgggcatttctttctctcttgacttgggatctatgtccttttgccattggtaaaacctcctttcaatttaccgtgaattactttctcacgccggacttcttctcgtctttaccgtgacctctataggttctggttgctacgaattcgcccagcttatgtcctaccatatcttcggttacatataccggaacgtgtttcctgccgtcatgaactgcaattgtgtgaccaaccatctgtgggaagattgtagaacggcgggaccaggttttgattacctgcttctgtcctgctgcattcatagcgtctactttctttaacagatgcgcgtctgcaaatggtccttttttcagtgaacgagccatgtgttcttaacctcctttaactatttgatggttctgccatcacgtcttcttacgatcaacttgttagactgcttgtttttctttctggtcttcagacccagagcaggcttgccccatggtgtgcacggacctggacggccgataccacacttgccttcaccaccaccgtgtggatggtcgttggggttcattacggaaccgcggactgtaggtctgatacccatgttgcgcttcctaccagctttaccaatgttgatcagggagtgttcgccattgcccacaacaccgattgttgcgcggcagatgattggaaccattctcatttcgcctgaaggtaaacgtaaggttgcatacttgccttccttagccatcaactgtgctgaattaccggctgaacggactaactggccgcccttgccaggatataactcaatgttgtgtacctgagtaccaaccgggatgtgatacagtggcatgcagttgccaagctttgcctctgctgtatcgccgctcataaccttcattccgtcggttaagccctgtggtgccaggatatatgccttctcgccgtctgcatagcagataagagcgatgttggcagttctgtttggatcgtactcaattccgataacggttgccggaataccatccttgctgtttctcttgaagtcgatgattctgtattttcttctgctgccgccgcctctgtgacgaacagtgattttaccctgattgttacgaccagcgttcttgttcagggatactaccagagatttctccggagtgtcctttgtgatttccttgaaatcagaaccggtcatatgtcttctggaaggtgtataagcattatacttcttaattcccatgacattttactccttttctttttcttttcacggcgtatgactttggtagggatatctgggatatcccggatgccgtataagttctccgtccgggtgtgtccggcgggtgtgagattttcttacagtccctggaaaatctctatctctttgctgtcttctgtcagctttacgattgctttcttggaagcagctgtcttgccgaaggtcattccccttctcttggtcttgccttcacagttcatggtgttcacgctggcaaccttggtgcctgggaacatcttctcaacagcctctttaatcatagacttgttagcgtctacatgtaccatgaaagtatactttctatcgcccatggcattcatgctcttctcagtgatgactggttttaaaatgacgtcatagtacttgatatctgccattatgcgtacacctcctcgatggatgcaacagcagccttggtagccactactgtgttgtacttcagaatgtcgtatacgttgatggagccgacctgagaggtcttaacgcctgcaatgttccttgcagataatactgtattctgatcattgtcagccagaaccaccagtgccttggataccttcaggttatccataacattctggaacttcttggtcttaatctcgtcaaacttaagctcatctactacgataaacttgttatcctgaacacggctggtcagagcagacctaagagcagctctcttttccttcttgttcagtctgatggtgtaatctcttggtgttggagcgaataccacgccgccgcccttccactgaggagacctggttgaaccctgtcttgcatgaccggttcctttctgtctccacggctttctgccgccgccggaaacctcagaacgtgtctttgctttctgtgttccctgacgtttatttgcaagctgtgcaacaactgcaagatgtaccagatgctcgttaacttctacaccgaacacggcatcgttcagttctaatgcgccaacttctttaccttccatattgtaaacagatacgtttgccatttgtgtgttcctcctttcctataaaagcttacctttcaaccttaacggtttctttaattgttaccaggctcttctttggtcctggtactgcgcccttaaccagaatcaggttattgtcaacgtcaaccttgacaacctccagattctgaacggtaatctgcttgctgcccatgtggcctggcattcccttgcccttgaatacgcggcctggggttgtagcggaaccgttggaaccctgatgacgatggaacttggaaccatgtgccataggtcctctgtgctgtccgtatctcttgatggcgccctggaagcctttacccttggaaatagcggttgcatcaatcttatcgcctgctgcgaagatgtctgccttaatctcatcttttacggaatactcttccgcattctcaaacttgaattctcttacatatctcttgtaagaaacaccggccttgtcaaaatggcctttctgcggcttgctgaccagtttgtccctcttgtcaacaaaaccaacctgtactgctttgtaaccatcgttctcagctgtcttaacctgtgttaccacacaaggtcctgcctgaagtacggttaccggaactaaagcaccattctcattgaagatctgggtcattccgacttttgttgctaaaatcgctttcttcattgtcttacctcctgtttcatgatctacagcggaatgctttcgcattcatcctagaacagcctaatatacgtggaacactatgaaccgcctggcggtatgttgattcctcaacaggaaatgcagtgttgcttctatatttaaacccttcaggatataaacatttttatcgcatccccatcctgttcaaacgggaaccgcgaacccagctgcgctgcgcttgcgcagcatgaaaacgaatctgtcttcgattatttcgttttcatcttgatgtcgatgtacacaccagctggcatttccagtctggacagcgcatcaactgttttctggcttggagctgtgatgtcgatgagtctcttgtgagttctctgctcgaactgctctctggaatctttgtacttatgaaccgcacgcagaatagttactacctctttcttggttggtaacggcaccggtccgctcacctgtgatcctgtcttctttacagtctcgatgatttttccggcggactgatctactaactgatgatcataagcctttaaagtgattctcattacttgacttgccataaaaaaagtcgcctccttttcgcactttcaaaccaagtacgacaagcggtgactgtacacgtttccgtgtgtgtcctaacagaactccacactgattctgcgttctaacattgcagtttctttaattggtacagtgacttgtcgccagtttcctaacttgacattcgctccacggaaaacccgcctcactttgtgggcagcaacctctcgcttcaacgctatcatgccacagcctttgtatgatagcacacattccaaataaatgcaagtatttttttcaattttcttcgtcagtgctttgtcagcctttgcccggagttttattggttttaattgattcttttcaacgcttttcccggagcaattttactcagactgacggggggatccacaagtaaaaaaggaaagacctcccatttattatagaagtctttccttatatgaatcattttagtcacataccggtcatagcgccagcctgtttactctgtgcagtatggctccgtgggctcctgtgcgtaagaatcaacatcactgtcatcatccgcttttgtcagctcgcctgagctgttggttgtaaacttaacgccgtcgctgttctttacattgcttcccttcataaccttaccggaagcgttgaccacataattcctgccctccacccggtagcatacatacttctggccgtccgttgccttctggagttttcccttatagtataagtagttatccttaaccccattgacgccccgtccattgtccaggaagtaaaaatcgctcttattaccgtcgtcctcggtcaccttcatctttcctttttggacacagctcttattcttatctccaaagtagaacgcggtccagtcatcctcgccggaaccggtatagactttcttaagtccataaaccggattgcccagatggttgaacagataggatttgccgttcagcttcacgatatcactggtggtaagacgttcggaatcagccgctctcggcttgccgctgttattgaagtagaaccactccacggcttcctcataaccgttcagatcctcaggaggttcaatggaataccagccaatcttggccttgccgtcagaaccaaagtacatgtaatcctggatggagtcattggttgtggactttacgttcttccagcctgtctgcatggcgccgttctcgtcaaagcagtaataggttccgtctatcttacgggccgtgtaatcgccgtctgagctgtccggcgcatatttcttgccatttgaggagaaatagtaccagtagcggccgtcatcatctgtgacactgtcaattcccggcgtcaccttgtctgcgttgtcgtcatcgtcatccggcggatacagcttctgccagcccgtccgcataacgccgtcagaaccggtataatacatatcgtccagaatccagccaatctccatacggccgtcaccgttaaagtgataccacttattgtcaatctttttccaggcatctgtgattaccttgccgctgctgctgaaataataccactcgtattcgccctggtcgccggtaagcttcagccacttgtcagtgagcatgatgccgttgctgtccatataataatcagactcaacccacgcattggtggccataactccctcgccgttgagataacgccactggttgtccgccccttttttccatgtattatatattttattcccgttggagtcatagtagacccaggtgctccctgattgaacccaaccctctgctgccagggcagatatcgtagccgtaccaaagcacagcactgccgccagggcccacaccgccaccatctttttcttcatatgctcaactcctcttcccatctgcattcacccatatcagccctgtttctgccggggctgataatcctatggtatattgtatcaaggctccctcaattattcaacctaatttatctttcaattctattacaatttagccaaaccgtttctatttttccgaaaatgtaccgaatacttgacggagccgcagcacttagactatactcattattatcattattatatatggaagaaacgaggttaaataaatatatgtggcttgcagacgagtggaaggattatgaagtgatagactgttcaaagggagaaaaactggagcgctggggtgattacctgctggtgcgcccggaccctcaggttatctgggacacccccagaaaccacaagggctggaaaaagatgaacggccattatcaccgcagcagcaagggcggaggcgagtgggaattcttccatcttcctgagcagtggtccattggatataagggacttaccttcaatctaaagccctttagttttaaacacaccggtctgtttcccgaacaggctgccaattgggactggtttggcgccaggattcgcgaagccggacgcccggtcaaggtcctgaacctgtttgcgtataccggcggagctaccctggccgcagccaaggcaggcgccagtgtcacccatgtggacgcctccaagggcatggtggcctgggccaaggaaaatgcccagtcctcaggactggccgatgcccccatacgctggatcgtggacgactgcgtgaaattcgtggagcgggaaatccgcaggggcaaccgctacgatgcggtcatcatggaccctccctcctatgggaggggaccaaaaggggaaatctggaagatagaggacgccattcatcctctggtcaagctgtgcgtccagctcctgtcagacaagcccctgttctttctgattaactcctataccaccggactggcgcccgcagtcctttcctacatgataggcgtagaaatcgtcccccgtttcggcggaacagtaagcgccgaggaggtgggcctccctgtcacccagacaggcctggtgctgccctgcggggcatccgggcgctgggaagcataatgcaaaaaagtcccgcatcaggattcgctgatgcggggctttttcttgcctggtgctaatctctgttcttatcacctgcttcttaatcacttggtcctttcattttacataatcccgtacttatcgaaagaggcttttgcagccataccgttcttaatggcctcagccaccatcttctctccagtagccttttcaacagccctgacaatcacttcctcctcaatctccttagggataacaaggacaccgtccaagtccccaaatacaatgtctccgggattgattttcactccctccatgtcaatgggaaccctgtagtcaatcacctttcctctggggccctggtcctgggcatatctcccataagaaaagcatgggaaatccaggtccaggattccgttggtgtcgcggtgaaatccatttacaacagcgccggccgcacccagtatcttcattctcgtacacatcagctcccctaccagggcatatgtgggtgacgatccggtacatatatatacttcgtttttcttaaggtcatccagcgcctccagcataaggccaaagctctgcctcatgattggattctgcccctcagatactgtctccagagcatctgcctcaagcacagtcatggcccttccggccaccaccatattttcccgcatgggctgaatcctccatggcaggaactgatggagatagttcattttatccaatatatcacctataacagatgaatacagtgtttccctcatgagagcaaaaagctcgtcatcatttttccatacaaccatgatttaataaattcctctcattcatatgtaatcgttctctgtcaatacgtcaggccctatagctttccaactccctcatggcctcctgaatcaagtcagccgtaaccggatacggtgtatggctgagttcctgattttccacagccgccgccagcacatcctccagatcatcttccagggtaagtcccaaatccttcagacatgacggcagtccaagggaacgattgaaccgataagtcttttccaacttatcccagtcccgatccaccatcagattaaccagtgtaccataagcaaccacatctccatgaagataattttcctcgatctgtctgcgtctcgtaagtccatagaacaatgcgtgggcaatcccgcccacataatccgaatgtacggatacagacacgattcccggagtgataattatgttaagcaatattttttccagttcttcactgacaatccccgccttagcgtcttccactgccttcttaccaaattccagcattggatagaagcacagccttcccgctaaaataccaaattcgcttccaaagctcagcttctctcctgccttggccgaccactccgactcaacatgttttgccatggcatctcctatgccggccctgagataacgaataggggcatccaggataatcccgggatggataaagcaatggaccggaaccgaatttaaccgtttcaccttctcaaacgttccgtcttcaccatacatgatgctcagctttgtaaccggagcacagttggatgcaatggtgggaatcgtaaacacaggctttctcagaagatctgctgccagttttacggtatccacgcattttccgcctcccaccgccagcagcacatccgactgcctgaccctctgatctgcaaccagacgttccacattactccaggtggcttcatggccatagagaatttcacccgtcgtcgtcatgccggctttttccacagcctgtgtaacataccggccggcggcattccaggctttttccccatgaaccgccgcaatcttatttccatatctcccaatcacatcccggaacgcatcaaatgcattgagcccgatggtgaaatgcggaagataaacagactcctgtcctttcattccatttcctctctgcccatacggcagggacaggattacagactctgccccatggccgcggaaatcttttcacagatttcctttaacgcctcatggcatctctgctccagcccggcgtcaaaatattgaataattccgctcaaactgagagccgcctcaatcttgcctccataaccgaatatgggatatgtaatacatttcaaataaggttcactttccccttcattggtggcataaccgtttttcctgacagcatccaggacgcttctgtactcgtccttatccgtgatggtcctctctgaatatgattcaaaggaacaatgactgataattttctccctgacctctgccgcagaataggcagttagcacctttcctgcccccgtattatgcgcctccacttcaccgcctatcttagagttcaaatcaaagacaacagcgtttgcattgggcaccacacggtcaatcagcacgattttttcgccttcaagcacagacagatgggcaatcagattcagttctgttgtaaccttctccagataaggcctggcagcttccacaacgcttataaactgaaatgcattgctgctcagcacgtaaatggacatgccaaggctgtagcgcttggaaatctcgtcgtaccttacaaacccttcttcctccagggtcgtcagcaccctgaccatggttcccttgcgcatatctgccctctcgctgatttcagtcagcgtcatgcttttatgggcactgtcaaagagttttaaaacctttagcgccttttttaccgatgagattgtatattgactttcccgttccattcacccaactccaaaccttttttatttattatagtttatgtgctcgcctgcggtcaaccggttaatcctgcccctactttgagaacaatcccggaaggaaggtcgaaaagcccgggaagaacacaaacagtatctgcacaaacagcatcacaaacaggaagggaaggattgccttggtcatctttgatatctttgctccgctgattccctgcgcgacaaacaggttgattcccaccggaggcgtcatcatgcccagcatggtccccactgtaagcagaataccaaaatgcagcgggctgacacccagtccttttaaggtaggcaggaacaacggtgtataaatcagcacctgagaagctgtctcaaggaaggttcctgtcacaaaacatagcagcacaaagagaatcagaatcacatggacattgcccgtgatgcccagaatcacgcttccaatgagctgcggaatctggtttaatgtgagatagcgtgaaaatgccattgcaaatgccagtatgaatacagtggttcctgctgtaactgcacctttatagagaataccgggcaggtccgacactttaagctcctttgtgatgaacagtcctacaaacatggaatacaccactaccaccacggctgcttccgtgggagtaaagataccgctgtatatgccgcccaggataatgaccggggcaaggagaggccagattgcctccttaaaactggcagccaccttcttccactcaaattctccctcatcagacttgtatccgttctttttggaaatcacataggtggtgagagccagggctgccgtcatgaggaaaccaggtatgaatcctgccatgaacatctccccaatggacacctcaccggcaatacagtagagcaccatgggaatagatggcggaatcaggactcccaaagaacctgcactggctgtcaatgctgcggaaaaatccctgtcataccccttctccaccatgggaggaatcatcatcgcacccacggctgcaaccgtacccggagatgagcctgagatggccgcgaaaaaagcacaggccagcacggttatgattcccagccctccatgaatgtttcccacaaggctggctgcaaaattcaccagccttttggacagcccgccggtctccataagatagccggccagaatgaacatagggatagccaggtatgtataagagtccaatcccgtaaatgccatctgtgatacaaacgccaggggcatacccttggccaggaccgccgccacagtcgacagtccgatactgaacgataccggtatcccaaggaatacaaataccagaaatactgccatcatcatcagaaatatgctcatgatttagtttcaacctcctttttccggactatcatcttaaacactgcctgcaggaatctgaaggcaatcaggcagaacatgacagcaaccagtgcatacaggcctgccataggaattctgagagaggcggacagctgtttggaaaggctggcattataaatgatctgtctggagttgtaggcgatgaccaggctgacggcagcgcacagcagctttactgcaatgtctaacgcaaacctgccgcgctctgaaagtacattatcaatcagctccaccctgacatgggcgttgtccagcacagctgcgctggcaccgcagtatatcaggataatgaatacatacctggacagctcctctgtccatgccagcggaagattgaacacaaagcggaacagcacctggagaaaacacaccactatcagaatcgtaaacagaaaaacaatcagataatattcaaagtttttcttttttttcattgatacgtaacccctttctgtgagtcatctactgcaccgctgcaatgatatccagcatttctttatatctgtccggatttatctcattgccatatttttcgctgacacccttcacagcttccctgaattcatcctttgcctcaggggtaagctccaccacctcaactccggcttccttcatcttctcaagggccaatgcatcctcagactcacagctctctttcatatactcagtggctatctttataccatcgttcagaatctgctggtaggatggatccagtttatcataccaatccttggaaacgacaaatgtgacaaaggtaaatacatgaccatccagggtaagatacttctgaacctcatgaagcttgttagcgtaaatattcattagcggattttcctggccgtcaacaacgccctgctgcaatgcagagaacagctcgctgaatgccataggagtgggattggcccccaatgcctcaaacacctccagatgaatcggcgtggtcatggtccttatttttaatcctttcatgtcctccacactgttgattggatgcttgctgttggttgtatgacggaagccaaagtttccaaatcccagacccacatagccgatgtcctcaagctcctttagcagtgattgtccgaattcaccttccacaacagcctccacctgcttttcgttgtcaaagagatatggcagtgacagcagtccgaagtcctttgagaagtttccgatgatatccgtaccgcagggaagcatgtccgccactcccagcttcagtccctcaaaaacctcctggtcatttccaatctgggctcctgtgaatatctctaccgtgaagtttccccctgtctgctcttctatgtattccttcatcttatttacagcaaccgcctcaaaatggttatcagccacacccacgctgaccttcatggtaactttctggcctgactgtgtcccggtgtctgccggcgcactctgggatgcctctcccttcggtgcctgtgacgctgtctgtccccctgtgccgccacatgctgtcaataacatactcccggctaataatgctgctaacattctcttcttcatttttaaatactccttctcttagtattctttattctacaactgctcccttggatgcagatgcgctgattcttctgtatgtcctcagatatccccgctttacttctttttccacaggaacaaaacgtttcctgcgttcctcaagtatctcctccggcaccttaagttctatgctcctggcatcaacatcaatttcaatcatatccccatcctgtatcagagcaaagtccccctgttcatatgcctcgggtgagatatggcccacgaaaagtccgcggttggaccctgaaaatcttccgtccgtaatcagggcgcatgtatcagacagccccattccctccagatatttcatggttttgtacatctcgggcatacccggtccgccttttggcccctcgtacatcaggaccatacaggtgcctggtttcaccctgccctccagtacggcctgataggattcctcctcggtggtaaagacctgggcacggcctgaatatctgaacatgtgctttggcacggccgcgggcttgattacacatcccagcggcgctatgtttccctttaatatggcgacaccgcctgtaggtgcaaagggctcctctgccgttttaatcatgtttctgttattggtataagaaaaccgtgacagtgcctcccccattgtaaggccggataccgtcagggtatccttgtgcaggtattcctctatctccttcaatacggccggaactccgcctccctcgtaaaagtcaaccatgtcaaattccgaagccggataaatggaggccacctgcggagtttttctgctgaattcatcaaatacactgagcggcagttcccccagtccggcttcatgataaattgcctggagatggagaataccgttggtggatccgcccattgttaaaaggtgcataaccgcattttcaaatgcttcctctgtaaggatgtcccttgtggtgactcccttttgaaccagttctacaattttctctccggtctcaaccccctttgccatgcgggctgccaggacagccggaatggtgctgcttcccatcagggacattcccaagctctccgatagggcgctcatggtattagcagttcccagcatggcacaggagccaggacacggttccgcaatatcttcaatatgccggaactcctcttcatcaatccttccctgttgtttccacccaatagcctctgtcacaatgtttccgtcgtaatgcctgccgcagtaggaagccggatacatggggcctccattcaggaaaatggccggcatctccagcctggccgcagccatcagcatgcccggtacaatcttgtcgcaggagcccagcagcaccagtccgtcaaaccgatgggcccttaccatacactcaatggatgacgcaatcaaatccctggtgggcagaatgtagcgcatcccctcatggccttccgcaataccgtcgcagggagccaccgtggagaactccatgggcgttcctcctgccttgataatcccttcctttacgctctcgcacagctgttttaatacaaaatgccccggcgtcgcattggtgtagctgttagcaatggcaataattggtttgcccagctgttccccggtgaatcccatagacttgtacagagcccgctttagagcaccctgttccccttttaagatatcgttctctctcattacccttcccttcttttgttttgtaatagaaaactttgttttgtattatgagttaaaataataagttttgcattgcaaaactttgttttgtttttatacttatataatactcctactcttgttctttgtcaagaatcataatggggttttcaatgatttcataaccttaaattataaaaatccagttaaaaagctgctgcacaactgcaacagcttttttccacggctggttaacgtaatttttagccggctgccaattgggactggtttggcgccaggactcacggggcccaaaaggaagatccggatgatagaggataccattcatcctctgagcaaactttacacggcatttcctataaagccagggcgccctccggctggttcatggcgtacgttccacccagatacccccttggcagcatgggctgtctctcaaacccggtctgcatttcataaaaatgcttcgtgtgcccgctctcaatcacaccggtcaggacttccagcgaatgaagcgccatatccgccctggttctgggaacacgtccctttctcagcgcccaggccatttctgccaccccaagtcccctgtcatcgccgtcgtatccgtgggtatggggaaatacaaccggttctgtctgtccctttaagatgaccttcacatcacccccaaagaagttggggtcctccaggaacaggattccctctgttccataaaaggcaacataaggcttctctgtgcggatacttcttgaattaaaatggagggttcccacacatccgttcttaaactgcagggaaccggcaaggtatgtctccgactcctggacgtaggtttccccgaagctttcattctttacaaagtaatgggattgctccggcatgcatacaccggacatgccgcacacttccttcacctctcccaggatattaaccatggctgtggtataataaatccccacatcaatcccgatgcctccccccggcctggatgtatagggaaatttctcagccagaagcctggcatccctttgcagaaccgccacacaggaggtcacggttccaatcacgcccgattccaccagatacctggcagtctgcacggctgctcccaggaatgtatccggggcgctgcacagcagccttcccttttcatgggccagcgcagccagtttctgggcctggccgaaggttgctgccagcaccttttccgtgtacacatgcttgccatgttccagaaggttccgtatcaccccataatgggccgccggattggtcaggttcaccacaatctcaatcccggaatcctcaaggatttcctccatggtcaggacagagatatcataggccgccgccgtatcttcagccagctgccggtttaagtcgcagcatccagccacctccaggatttcaaacgcatttgtcatgttctcaaaatagatgcggctgatggccccgcatccgataactgctgtttttacctttttgattcctttcatcggaagcctccttataccgcgttatcccggattacaccggaataccagcgaccgctttccttgataatccgctcctgtgtatgaaagtccacaaatacaattccgaaacggctttcatatccaaaggaccactcaaaattatcatacagggaccactggaaatatcccttcacattaaccccctgggaaacagcctcccaaagcgcgagcagatgcctgtgaagataatcctttctcggtccatcctccacccttccttccatggaaaccacatcgtgggaagaggtgccgttttccgtaatataaatcgtttcaatgccgtattcatttttcatgcgcagaagcatgtttgtaaacccttgctctgttaccggccagttcctgtcattgaccggaatgtgtttgggattctctatcttaaaaccaaggggccatacgtgctcatctgcctttacataaaagtcattgtaatagttcagcccgatgaaatccagcttctggcctatcagcttcatatgctcttctttaaactcaggcagccggactcccttggatcggtaaagttcaaccatgtcctcaggatatctgccaaacacaatgggttcagcaaaccagcggttcaggtatccgtccgccctgacagccgccgccctgtcctcttcgctgtctgtcagcggaagccttcccataagattcagggtgattccgatttccccctcatatccctgcttgcggaaatattccactgccaggccatgccccacatagaggtgataggaaacctgtacggcggcggaaaagtcgcgcagtcccggtgcctgccgtccctcataattgcccagaaaagccgcgcagtacggttcattcaaagtaatccatttctttacccggtcatggaatgcatccatgacaatcctggcgtactccatgaaatacctcggcatatcgggattggtccagccccccatgtcctgcagggcctggggaaggtcccagtgatataaggtgatatacggctcaatcccggcgtccagcaattcatctatcagacagctgtagaaatcaagccccttttgattcacttccccgtatcccttgggaagaatcctggaccaggcaatggaaaagcggtatgccctgattcccatctgcttcatcagcgccacgtcttctttgtatctgtggtaatggtcgcaggctgttttcccgtcatccccatccagaatgttgccgggaatggaacaatatctgtcccatatggtctcccctcttccatcctcatcccatgccccttcaatctgataggacgcggttgccaccccccagacaaatccttccggaaaatgatgtttccccgcctccgccttaccggaattgccttcatatctctgcatcatcttaccccttcctattcatcccgttccaatagttccaccacgaccttcaggctgtccagcgcatccatgaacgcatatcttccgttggcgcccctgtattcgcctctctgcaggagcttcatgccccagtcctcacagacgcttatggtcttttgcattcccttcacattaaatgatatatggtggattccctcgccaaactgttccagatgttcccgccatatactgggctcctcattgggctgtatcagctccatctgcaggtccccgaagtaaaagaaggtcatatagcactttgccttcggagcaggctctcctctgtattccgtatgtgtaatctcatactcaccgctgtttacagtctccggttcctccaccccaaaaaaacgtgcaaattctttttttgtcttttcaatatcatttaccagaaaaccgatctgcgccagccgcatatcttcaatgggcctgtccatattcttatccatctattcatccttcctttccatcctttatccatgcacagcatatcatccatagattcttctatacctgcttcgcagcctccatcttttcaatggcctccatcaagcccttgatgtaagcagtatccgcatatcttaccttatgcccccattccctgtccccttcaatacccgggacatggtcgctgacaagaaatccgtcaaatccagaatgcatcagcttatacaccacctcaaaggggtcaaagttcccctcccccaggaaacactcctggaatttgggcacggtcccccgcacatccctcatgtgcgcataaaccagctttttcctgggtccgaaatatttaatggcgtcgaagatattcctggccccgccctccatctgggaaaaagtcccgatgcagaacagcaggccccagttggggctgtcaatcatggcctccgcccgtttatagctgtccagatcgatgaacatccttgctatgccggacaggctttttacaggagggtcatccggatggagcgccatggtaacattgtattcctctgcaaccggtataactcgtttcataaagtactcgaaattctcccacagcagttccacatccgacaccgccacgtcccttctctgcccaaaatcatccatgtcatccacgccctgtttctgcatttccaaatcaaatgcctgtaccgtggccccataccgtcccacaggggcgtggttatctgtcctccatacaaaggaaggagagaaatgatatcccagcacaggaatacccgcccgccccaggctgcggatggactcgcagacattttcaatctgcctgtcccttccttccagtcccagcatagccttatcgtaaaaggaaatgggcatgttttccatggcctccacaataacgccgtaacggtcacatgcttccctaaaacgggccaggtcctcatatttccacaatccgtccgccggcaggtcatggggcaggttgaactggaccctgtctatccccatctgcctggcattggtaaggatttccttatctacgctgcgtatctgtccataagccagtctcatattacatcaactccaaatccggtccagggaagtttcctggttccattcatctgtggatacccacacatctttgttcttcatcggcccatgttcgcggataaggtcctcgttaagtccctcaatgccaagacccggagcatccgtgaccactgtgaatccatctttcacaatgggcttcaccggcccaataattaaatcctgccaccactccgaatcaaatgcgtcatgctcctgggcaaagaaattctcgctggcagtcgccatatgcgctccggccagggcggacacagggctttcgcacatatgcagggccatggatgccccatacctggctgccaggtctcccagcttctttgtctccaggataccgcctgaggtcagcaggtcgggatgaaccacatccaggacgcctgcctgaagaagcggttcaaatgactccgccaggtacatatcctccccggtggcaatcggagccgtggtggcgtgcttcagctccccgtactggcctgtcaaataccagggcagcatatcctccagccaggcaagatgatacttttccagccttctggcaatctttatcatatcaggaagagggaaatggccaaaatggtcaatggccagcggaaccttggtgccaatcacgctcctgacccttccaatatattcatccaactgttccaggccctgttccgtcacatgcatgttagtaaaaggatgaggaatcctattaaaatcatacagctgcgcattagccgccgagctttcagcccttgtgccggtccttgtaacctgacgcaccttttcctccacggccctcagttcattcacccagtccagaggaccgcagtaatttccttcctgggccatcagaagctccacgctgagtattttgaccacggtaaatccctggtccatataccccttcaggatgcggcccaccttctcaggttccatcagaatgccggtggcccttccctcctcgatgtgggtatccgcgtaaagtcttaccttatcccggaaccttccgcccagaagctggtacacaggcacgccgtacgccttgcctgccagatcccagagggccagctctatggcgcacacaccggccgcctgccttgccggaccgccgaactgtttgattttcctgaatatccggtccacttcacaggggttttcccctacaatcctgctcttcagatactttaagtaggtggcgctggcaccatcccgcatttccccgtatccgctgattccctggttcgtatcaatccgcaccaggtaacagccccagggcggaaggtcaaccttggtaaacttcacgtctgtaatcctcagcttcgacggattggagctgcggcgtacataatccaaacattcctcataattcacatttgtctgcctgcctttatattccattatcatcctcctgactttattctatcctgtcaaacctcggactgctctagccctttaccgctccatctgccattcccttgacaaagtacttattgcaggaaaggaaaatgaggagcacggggaatgccacaaccgccgaagccgccatggtggagccccagtcaacagaaaactcccccgcaaacatgtgtatggcgattggaagtgtcctggtcctggtggaagtgctcaagttcagggcaaacaagaattcctcccacgcatggatatatgtatagatggccacggaaatcagtcccggctttgcaatgggaagcacaactctgaaaagagcccccattccggtgcagccgtcaatcttagccgcctcctccaattcctttggaactgtctcaaaaaaggagctgagcatgatcacgcccatgggtatggtcaatgccaaatccgccatgatgagcgaaaagtgggtatccaaaagccctgtctttgcaaccaggaaatacagcgggatgatgataaccacgctggggatcatctgtccaaacaaaagagctatcttcaaaaccccgtgccctttaaatttataccggctcaatccataacctgccaggatggatatgaaaagtgtaaccgccaccacacaggccgtgatgatcacgctgtttataaaagccaggtacatcttggaattggtcagcacattcacatagttgctgattgtcggggtatccgggataatctggggagggatgttatattgttccgtgggaagcttgatggaagtggacagcatccagattgccggaaagacggccaccagaaccaccaggagcaaaaccgcataggtacagacctgccaaaccggactggtgccggttacggactttttcattttcgccattttacttcccctccttttctcttgtcagatagagatacacaaggcttaccgacatggataatacgaacaggaccgcgctggcggcgctggccattccaaaatcataatccatgaatgccctcttataaatatacatggccatgacctctgtcttgtgggccggccctccttctgtcatcgcatatatgaacgtaaatgcgttgagtgtccagataatcatcaggagaatggtggaataacaggtggcggctatggacggccaggtaacattcttaaaaatatcaagtatgttggccccgtcaatcaccgcggcctccttaaggtcttttgatacgctctgcagggcagcctctatcatcagcaggataaaaggaaacattttccaggtattgaccgcaatcacggaccacatggcaaccttcgggttggacagccatgtctggtttttctcaataatcccaagggagcagaaaataaagttgatgattccatagtccgcattgtacatccatttccacacaacggatccaatgatgctgggcgtcacccagggtatcatcagcaggatacggatgaacgtcttcccttttacaaagggctggtgaagcaccagcgccatgataaagcccagaccgaactgaaagaaaacgcttccaaaggtccagagcaatgtattgccaatggagcctataaagaccttgtccccaaacagcttcttatactgggaaatgccgcagaaaacaggggtctgcatgaacagggtattattaaagaaacccattattagcgtataaaacaaaggatacagcatgaccacagcaacaacgagcactgcaggaagtacgtagccagctccggaacgttttatttttctaagcatactttcacctttctccttttaagaaacaggccctgcctgccggtaccgccccacgcataagcactggacggcaccggcaaagcctgccctgcccgaattactccaataaaccgtttactgcctggtcaagcaatctgcttgcttcttctgcggacatatcctcggacaacattaactggagattatccatgatggcctgccggattcccacaatgttcttcactgccggaagcgcacttgcatactgaagggcttctgcattgggtttgatgatatcctccggataatccgcataacgcgccgccacttccgctgttcctgtaaatgtgttggtatagatagcagcaatgtctggtctggtaaggaacttcacaaattcccaggcagcttccttttcctcgctgcattccgcaaccgccacagaccagccgcccaggattgtgtttctctcagcgccgttggcagttggaaccatggcacaggcaaaattcaaatcaggatttgtcttgacaatttcctccaaatcataaatgccgcttaagtacattgcaatcttgccgcttgcaaacagggtacggtttgcaatgttgtcattttccaaaagggatgccggggaataggcagccaggtccttataaagctgggccgtttcaacagccacactgtttcccagttccgatgcagagttgtctgcattcagaatatcgcttcccgaggagcggagcatggttatgtactggaatgagaagttggaatagttggttccgcagagtccgtacccatacacatctccgttggtacatgccgcagccacttccttcacttcctcccatgtggccggaggcgtatcgtatcctgctgctgataagatatccttattgtaatacatgacataggtctcgctgcggaatggcaggccgtagagctttccatccacagtggaggcatcgttggccccctgtacgaactggcttacatcaaaggaatcctttgccacatactcatccagcggttcaagcaggtttgcgctgccaaaggtggtgacccagtcaagggcgcaggccatcacgtccggggcagtgccattggtcaatgccagcatgtatttatcattggccaggtctgcctggaattcagcctcaatcttaatgtccgggtgttcctggttccagatcgcctccacctcgggccatacggcttcctgccagtttccgtcccagaacttgatggtggtctgctcccccgcagctcctgcctgcttcccggaatcagccgcctgtccctggggcccggaagcctccccggccggtttctgctcccccttccccgaagagcatccggtcataagccccatcgccatcgcagccgccacagttacgctcagtgttctcctcactgcctttttcatgtttcttcctcctcaatttcgtttccgtacttctttttctaaaaatgttaacgttgccatttatttcgtgtctttatactagcaaacttttgtgcatattgcaagtattttttaataaaaaatagtttttttaacatttttatctcttttctaaaatgttaacgttattaattattgtcatttcaatgccttgaaactgattttgagttatgctataatgaaaacataacaaatattttcataagaggggacaagaatgaaaacaataaaagatgtggctgcttattccggtgtttctctgaccaccgtttcacgggtagtcaatggttctgataaagtctcacccaaaacaaaggcaaaagtagaccaggccatcaaggaactgggatactttcccaacaatgccgctcgctcgctggtgaaaaagcagacagactccatcgccatcctgctgcgcaacatacatgacccatttttcaccgacctgatacgtgggattgaggatgcctctgccacccttgggcgcaacatcattttctgcagccccggtaaagacgaaaaggtacgggaccgctatatcgaatacctgaccaacggtatctccgacgccatcatcctgtatggctccctctttacggacaaggctatggtagagcatcttcaggaagtggggttcccgttcctgctgatagaaaataattttcagatgatgccggtcaaccagttcctcattgacaatgttgccggagccagggatgcagtgaactacctcatccgccataaccacaaaaggattgcccatgttatgggcaatcccaataaaaaggttatcctggaacgtctcaacggttatatagaaaccatgcaggacaacggcctgttaattcaggactactatatacaaaataccctcagcgactccactctctcccttccgaaattcagggaaatgatgaaccgccccaagggcgagcggcccactgcaatcttctgcagcaatgacaagattgccataatggtaatcaacgaactgacggaatccggattcaaagtgcctgaggatgtatcggttgtcggttttgacaatctgaatacatacggtttctcctaccgcggcccccgtattaccagtatcagtcagccattataccagattggatatgacagcatcatctccattgacggcgtcctccagggcagtatcgaaacacccatcaacaaattttaccccaccacgttagaggagcatgagacggtgtgttctttgtaaaactgcttttaggagcttccctgtattagaccggacgcctttggagatgtattttcactccagcagccgtcccacatccagcttcccccacccctgctggttatggggaaggcccaggtccagggcccgttccctgatacgaagcttcacatccttgttgctcatgtccgggtacttctccagcagcagggctattgcgcctgacacaaggggcgtggacatgctggtgcctgactttgaaaaatatttgccgggctcattgcagcagctgatgatgcctgagcccggcgctaccaaatccggcttgcagacacaagccagtgtggggcctcttccggaataatccaccatgcggcttcccatgacgtccacttccttgtgatcgtcggagcagcccacggttataaccttgcggctgatgccgggagttgtgatggtcattcggcccggtccatgatttccggctgccaccactaccaccaggccgtcatcccaggccgcattcaccccccgcaccagaattgagttctctgtcatgtccctgcgggacaaggagcctacggagatattcacaatgcggatattatatctgtccctgttctcccggatccatttaagtccggtcagtacgtctgtggcatagccgtttcccttctggtccagcaccttcaccgatatgagactgcatcccggcgccacccctctgtatttcccgtcggaggagataccgctgcctccaatcattgcagctatatgggtgccatggccattgtcatcatagggcgatgtgcggtggtttacaaaatcagcaaaggctgtcactctatccttaaaatcctcatggaggtaaattccggtgtcaagtactgccacacccactcctctacccgtaatacccatggaatacacttcttcacaattaatgtcttctctcgcctgattcacatcacgattttctccttttttattaggatattctataatgaaggaatctgtgccagggcaccgtgtgacgcggtcaggcaggcaggactgtcaggcagataaaaccgcctgacaggagcaaaaatattttctttaaaaggaaggcggaacctgcttctgccggtccacgtcaatcacaccgtaggtattgattctcagcttcggaatgaccggaaggcttacaaatgccagggtcatgaatgcatctatatcgctgctgattcccagctgccttgtcaaaaccttcagagcctgcagctgctcctccacctcctccacggataaccggctcataactccgccaatgggaagcgcaagctcgcctatcacctgtccttctgccgccacagccaggccgcccctgttctttctcactgcgttggcggccaataccatatccctgtcattggtccccaccacaatcaggttgtgggaatcatgggctacgcttgtagccacggctcccttcttaagaccgtatccgcccacaaagcccagtcccttgtgtccggtgtgaagatggcgttcaaacacagctgccttcacaatatcctgttccaggctgacgccgggtgccagccccggagtattctgccagggcaccagacgctcctctgtgagaagttcatggggtttaaactgaataacccgctccatggcccccttttgctccagcaccaggtcctccagggcaacctcatccatatggaaggaatcaaacacccttggaaatgcagtttccaggccaccggctgttttttccgcagattcggtatcctccctgcttccggaccgcggctcctctcctgctgcataatttcgttttttttccttcccggcccccaggcatactccctcctttgccgtcaggactccgtccttgtatacagccgccacccggatatccttcaagtcctcaagcactgccaggtccgctctcagcccaggcatgacagcgcccctgtccttcagtccaaaataccgggctgcattaaaggttcccatcttaatggcccgtatggggtccgcgcccagggacactgccctgcggataatataatcaatatgtcccatagaaatcaggtcgccgggatgcttgtcatctgtcaccagcatacacctctcataatagggggcctcaaacaggggcataagtgcctccaggttcctggcagccgtgccctcccgtatcataatccactgtcctcttccaagtttttccagggcctcctctgcatctgaacactcgtggtcagaccacacgccggagcacacgtaggcattcagctcattccctctcaggaaaggcgcatggccgtctataaccttgcctcgcctccctgcctccgtaagcttccccatcagatcctcctggccggcaaccactcccactgaattcatcacctctgccagccccaaaaccctgggattctcatagtatggctttatatcctccggccccagcacagcaccggactcgtccagtccggtggagggcacgcaggagggcatgacaaaaaatgtatccagggacagtccctccgtggcttttaacatataatccacgccctggccccctgccacgttgccaatctcatggggatccgtaatcacggtggtggtgccatggggaaggactgctttttcaaactccggcggcgacaccatggaactttcaatatgtatatgcccgtcaataaaaccgggacagatatacctgcctgtcatatctacgttgacaagcccatcatattcccctatgccggctatgcagccatcctcaatggctatgtccccaatctctgtgcgctccgtaaatacattgacgattgtccccccttttaacacaagggatgcctttcttcttccggcagcaacgtccatcattttttttaaatcattgtattgtctcacacaaatacctccttctgtttattctttagcccccgatatatttgatatcataatactataatccatataaaagtacaatattctgatattattaaatttttatttaaattatcaatacttcttcatctatttggtttttctgcaaaatttttacattctatcattaaaatgcttgtatttccgcatcatcgtgctataatagtctcatggaagtatagctcagctgggatgagcgttcgcctcacacgcgaaaggtcatgggttcgagccccattacttccatttttcgtaccctttttcagtttacgattccatttcatttttctttcatcccccaaagcctgttttttccagcctcctgatttttcccttgcagccttatttgtttccgcggctttgtccagcgggtggaaattatcaattttaagattttcttaataatctattcaaagaacattcaaacattccggaggattgcatgctatactaagtacataagaaatgcacgaatgtttaacaactatccttcaaccctttttgaaaatccgaaaatcctaaagaaaattgctccgtaccacctggtacggagctttttctatgaattccataatgtttgactttctctatctccggtatccatctacggtacctatctccggttcagccctgccagaacttccctcaatttctccacatttccatcatcaaaacaatatccgtccatcccgcagcggcgcgctccctctatgttaagctcaaggtcatccacaaagaagcattcttcaggcttcagatggaaccgctcaaagaggtggccgtatatttccttctgtggcttcagacacaggacgtcggccgagaacaggatgccgtcaaaacagtccactgcgggcagcacgtccttatagcagctcaaaaggcgcacagatgcattggagcacagatagatgccgtagcccatggacttaagccatcttaccacatcctccattccttccttcttatacatgttgaactcatgccagcggttgaaacacagggcggccagactgcgctcctcctctgtatccaggcgggcctgcatcttttttaatgccatatcctccggcattactcccaagtccagcagaatccactcaggagatacgaatatggaagtgctgacctttttcctggtctcctggtcctctatgaaatgcctgcacactccgtccgctatgtagtccaccaggacatttcccatatcaaaaacaatgttcttaatcatcctatcctcctgctctctttcatatatgatggctttgcagcctccaaggggaacatttcaccatattcaaaaacccgggacaaggccccgggtttcacgtctcttaggcttccggtttttcaacctggataatggcagccttctgcataggaatacggcagtttttattgttaccgaattccacaatgactgtatcatctgtcatgtcgatgataacgccatagaatccgctgctggtgagaatggtatcaccaactgcaacgctttccagcaattccttctgtctttgcttctccttcttctgaggacggattgccatgaaatataacatacctcccagaagaacaatatagagaacccagaacatcggaccacttgtcattccattttcctccttcacacctaccgccgcctcgccgcagtagtttcttattcatcagacgccgtactgatcgcacggccggaaccttccataccggcaagcttggccgctttatactcagcataacggtgttcctcgatggcgtcgcgaatctctttcatcattgtattataaaaatacaaattatgcaaggtacataatctcattccaagcatttcttttgccttcagcagatggcgtatataggccctgctgtatgaacggcaggcaggacagccgcatccttcttctatgggacgggaatccagctcgtatttctggttaaacagattcagcttgccctggttggtgtacacatggccgtggcgtccgttcctggatggatatacgcagtcaaagaagtccactccccggtcaaccgcttccaggatattggccggagttcccacgcccatcagatatacaggcttgtcctcaggcaggcagggcactgtcacatccagaatatgatacatctcctcgtggctctcgcccaccgccagtccgcccactgcatagccgtccaagtccatttcccgtatagtccttgcatgctccatacgtatctcatccaccacgccgccctggttgatgccgaacagcagctgctgacggttcaccgtgtcaggcagggagttaagacgctccatctcggtcttgcagcgcgccagccagcgggtggtgcgctccactgaatgccggatgtagtcgtcgcttgcatggctgggagggcattcgtcaaacgccatggcaatggtggaacccagattggactgaatctgcatgctttcctcaggccccatgaatatcttgtggccgtcgatatgggaattaaagtaaaccccttcttccttaatcttgcgcagtcctgccagggaaaatacctggaacccgccggaatccgtcagaatagggcggtcccagttcatgaacctgtgcagcccgccaaattcccttatgagcttgtcgccggtgcgcacatggagatgataggtattggacagctccacctgggtgcctatttcccgcagatcatccgttgatacagctcccttgatggcgcccactgttcccacattcatgaacacaggcgtctccacggtaccgtgtactgtttccatacgggcgcgcttggcacgcccgtcctttgttatgacttgatatttcatatgatatgcctcaattattcctcatcgtctgccagagcagctttaatcatgatggcgcactcaatccgcttcttctgcatctcacagccaatgtcatatgccccgttgatggatccgctgaagttatacgcgttggcagaacagccgccgctgcagtagaacctggcaaagcagtccttgcaccccggcttggcgtatacattgcaggtcttgaactcatccctgatatccgtgttcacaacacctgtgtccacattgcccataaggaatttttcattgcccacaaactggtggcagggatagagatcgccccagggggtcaccgccagatactcagtgccggaaccgcagcctgccatgcgcttagccacgcagggtcctgcctttaagtccagcataaaatggaagaagttgaatccccttccctcctttttacgcttgatatactccagggccaggcggtcgtattcctttaagatggccgggatatcttcctccttgatggcgtaatcctctgacgggtcagccaccaccggctccatggacatctgctcaaaccccagatccgcataatggagcacgtcgtctgcaaagtccagattgttcctggtgaatgtaccgcggacataataattcatctgcttcctgctgtccgcaaacttctggaacttggggacaatcaggtcatagctgccgctgccgttacggaaggggcgcatcttatcgttgacatcccttcgtccgtccaggctcagcaccacattgctcatctcacggttgcagaattccattacctcgtcatttagcagaacaccgttggttgtcagggtaaaacggaatttcttgtggtgggcttcctcctgggaacggccgtattccaccagccgtttcaccacatcccagttcatcagaggctcgccgccaaagaagtccacctccaggtgctccctgtttccggaattggcaatcaggaaatccagtgccttctttcccacctcatagctcatgagggcgcggcgtccatgatactcgccttcctctgcaaagcagtaacggcaggccagattgcagtcatgggcaatgtgcaggcacagtgccttcaccaccgtcttcctcttcttaaagtctaccacaaaatccctgtaaatatccttggtaaggagctgctctgcttcaatcagctgaccgatttcatccagcgcctcctctatatcctcctggctgtatctgtccttcagacagacccttacctcttccttcacatctgaaggcagggcagcgggcgcttccatctccggaatccgctgtgaaaccagctgcacggcgtcgtagaccaccgggtccaccacatggacggatccgctgttgacatccaggacaatatgataaccattatttatatactgatgaatcacgaatttactctctctttccaagggccagtggccccaaatcctgtgcatggtaaagcccctataatcccatcgaccataggggcttgcaaccaatttcctgtatgtatctcttctgaccggcgattagcggttagcgttctcgcagctctggtttcctactgtacaggatgtcttgcaggctgactggcaggaagtctggcactcgccgcatccgcccttcttcattgtgtcctttaaggtattggtattcaatgtcttaacgtgcttcatactacggcacctcctattcatttaatattattaattatttgaaactataattccttgaaattataacacaggttaaagtcccttgcaatggtattttcaaaggtttgtcatattaaaggctcccccgggaatatactgcaacatagattctttcaaaaggagaacaatatatggaaaatggtattgtgaagcccatgctccgctccctgctcatctcctatgtgctgtcaggaatccttctggctgccctggcctttgccctctataaactgcgcctgaaagagggacaggtgaacctgatggtgtatgccgtgtatcttttgacctgcttatgcggcggttttctggcgggcaaacgcatccggcagcgccggttcttctgggggcttctgtcagggcttctgtacttcctggtgctttttgcagtgtcctgggccatgaatatggggtcagccattgatatggagcggtctgtcaccgtcatgggcatatgcgcgctgggaggaaccataggggggatgctcagttaatgttcaaaagagagaatacctgattccagtcatggccatggaatccggtcattctctcttctcttccatcagatgccctttgccgggccttattttttcttatttctttttcttcttcacacccgcgtcttccaggctccccacagcctgtgccagcacaaagacagcacttcccaaaaacacaaacatgtcgcccagattgaacaccaccttcttaagggatttccattcaatggtgaagtaatccaccacatacccgcgcaccacacggtcgtacagattgctgagagcgcctcccatcacaagagacaggcccagcttctccccggtctttcccttatcctgcatcatggctgccagtgctccggccatggccgaaatcaccataagcggaatcccctttaccaattccggtctttccttcataaatccgaagggaaaaccgctgttgtggttcttatgaagctttataaatcctttggcagacggcaggtcccttggaaacgtgtcgtcctcctgaccttccaccacgctcttgacccccaggtccagggcagccagcccgcctattatccagccataaatcatagattcgccttcctttccacccttttatttcattttactatggtttcacacctccgtccagtgaaaggtttctgaattcaagcatatactataacaaatatcctgcccgaggtgtgccatggcagactgcccatttaattccgccgacgagaatattgctgatttcatatacagaattggaagccagcagcagatagtcggcaatccggccgatattccctgtatggattatgtgaacgatgaatacaatatcatctacactcctctggataccgtaacccccatttccctggcccgatacagctactatactgtacccggacttttttcccttctggacagttccagtatggaggcctccggcatacttaccacctttgccgcgcctgccctgggaaacagggggcgcggaaccctaataggtatcgtggataccggcattgactataccaaccccttattccgctatcaggacggctccacccgaatcgccggactgtgggaccagagcatccccacaggagaggatgtcattcctcccggcgtgccggcctattatgaactcagcggcgcctcttatggcactgaatttaccagggagcaaatcaaccaggcccttgcctccgacagccccctggacctggtgccctccacagacaccaatggccacggtaccttcctggccggtattgccgccggcggctccctgccggaacaggacttcactggcgcggctccggaatgcgagatcatagtggtcaaactgaaacaggcaaaacgctatctccgcgaattctaccttgtcagccaggacgcagatgcttatcaggaaaatgacatcatgatgggaattaaatacctgagggtgaccgcattccgccttggacgccccctcatcatcctcatagcccttggctccaaccttggaagccatgaaggtacctcacccttaagcagcgttgtacaggatgccagccgtttcctgggccgggcagcggtcatcgcggcaggcaatgagacaggccgggcccatcaccatttcggcaccattccgtccggacaggagtgggatgatgtggaaatccgggtgggaccggaggaatccgcccgcggtttttccctggagctctgggcatccactgccgatacctactctgtgggctttgtctcccccagcggcgagataatctcccgtattcctattatagccaggaacgagacctctatcccttttcttctggaaccaacggtcattacggtcaattaccagctcattgaatccggcgccggaaaacagctgatattcatgcgttttagaaatcctgtggccggcatatggaaggtgcgggtctataatacccaatattttacaggagaattccatatgtggctgccctccgagggactggtatcggatgagaccgtatttctgcgtcccactcccgacaccaccattaccctgcccggcaatacggccgcgcccattacagtgggggcctataaccacctgaacaacagtatttacatccactccagccgcggcttcaccccttccggtattgtaaagccggagctggcagctccaggcgtcaatgtaatggggccttctgtaggccgcagagctggcggatccgtacccatgaccacccgcagcggcacctcagtggctgccgcccacgtggccggcgccgtggccagcctctttggctggggaatcgtggagagcaaccagattaccatgagccaggcgtccgtgaaatcttatttgatccggggtgcaagaagaaatccagcactccgctaccccaacgaagaatggggctacggagcactggatttatatgaaaccttccggcgtatcagggaataaccctctgttcagtaagctaaatgagccatgcaaaggtatgaattatccacgcatctgtatcaatggtccgccgcttttttccagatagggacgggtgacaacaacagagccgatattagggtccttgggaatctcatacatgatatccagcatgaattcctccagaatggccctcagcgccctggccccggtccctctcttgatggcttcaccggcaatccatttaagggcctcatcctcaaagaccagccgcacctcatccatctccagcagacgctcatactgcttggtgatggcattcttcggctctttcaggatgcggaccatcatatcctccgtaagcccctgaagggttactgtcacaggaagccttcccagaaactcaggaatcattccaaaggtccgcaaatcctcattggtcacctgccccagaatatcgggatccttatcatatgtatccttcagtatagaaccaaagcccatggtggttttcttcatcaggcgctccttaatgatttcctccaaatcggggaaggcgccgccgcagatgaacaggatattatccgtattcactgttgccatgggtgtcatggcgtttttctggttggagcctaccggcacctccacagtgcttccctccagcagcttgagcagctcctgctgtacggattcgccgcttacatctctggtattggtctgtttcttcttggcaatcttgtcaatctcatcaatgaatatgattcccctctgagcccgctccacatcgttatccgcagcagccagaagcttggacaccacgctttctatatcatcgccgatataaccggcctctgtcagggaggtggcgtcggcaatggccagcggtacatccagaagtctggccagcgtcttaaccagataggtctttccgcttcccgttggaccaatcatcagtatgttggacttttcaatgacaatgttcttatctgttccggtatcctcccctgccccgtcctgaggcggctggtccagaaatgcccttttataatggttatatacagccactgccattaccttcttggccttttcctggccgataacatattcgtccagctctgccttgatgacatggggcgccggtatatccttcatagtcaggaccggctgttccttggcttttttcttgattttctgctttttggggatttccactgcgggaggcgtcatgttcaggtcattgaggttcatgttcatatagggcatattaggcagtttggaaaaatccatgcccccctttgtcacggaatcaaatgctttctgcatacagtcatggcagagattcatgccgccgggcatggatatcatggggccggccttgctctcaggccgccggcacatgtaacacaccttttcatagcggtcttcttccttttgtttgtctttatcttcaccatggccggatgtctccacatcctgggtatactctttctcgtccaagtcagttctcctctctgttaaagggcgtaccgggccgttccatcgtcccgccgcttaacgtaaagtatataacaaaatgcttccccaaacaagaggaagcattttcatttcacattgttttgaaaaattttagttattgggcctgtgtttccgtattctcctggggcatggccttcagcgtgatggtgaccgtcctttcctggtattccccgtccttctgggactgtaccgtcagatcaatctgttctcccatctcgtagcaggccagaagctcctgcaaatccgtcatgttccggacgctctgtccgtccaccctggtgatgatgtccttttccctcaggtcagactgggccgcggctccttcctccagtatcttgtatacatacacacctcttggcattccgaaggccgctgcggactcttcatccacgctggttccctgtatgcccagatagcctcttttggcctcctccaccggattcatggtcttgcggttcataagctggttcatgatgtcctctgccttggatatgggaattgcatagccgattccctctacctcggtggaggaatacttggcggcattgattcctatcacctctcccttcatattaagaagggctcctccgctgttgccgggattgatggccgcatctgtctgcagaagttccctggtactggtatttgataccctgacctcccggttaagggcgcttacataccccacggtcacggactggccgtagcccagcgcattgccaatggctacaacgccctgtcccaccttcagttcatcggagttgcccagcctggccaccttaatcttgctcttggtatcgtccttaatctgctccaggggcactgctatgactgccaggtccgtttctgcgtccgttcccttgatggctgcgtccactacctcactgtcaataaaggccaccttcagggaggtggaatcctccaccacatggttattggtcacgataagaagttccttgtcattctcacccactatgattcccgaaccgctgctgggtacctcataggtctggggtccgcccctgaagaaccagccgtatccgtaattattgctctggtataccgccgtgctggtaattgccaccactgtgggcatggcctgttccacaatatcggacacatccgccactgcctttccattgttcctctggccctgctggtatccgccgttaccctgggcgctgccctggccgttatcctgtccgctgccctgactttctgtctgggcctttgatatctcttcctttttttccgcttcagccgatgcagccgcgctgtttcccatgaatctggatgcagccacattgacccccaccatggtcgcccctgagacagtgccaaagagaagggcacccgctgtaatcagggctgctttttttaaaatgccgccttttttcttctttgggggcatatcctccggctggggacggcgcccgtatgggtccccgccgtactgcctgttgtcataactctggttatcataagacttccacccgtagttctggtcgttgtcgtacattataattcccctttctcacgctttctcacgtaatctcccgattctgtacacagtttagcaacgatttgtgataaatgtgtgaccattttattatataagactaaaaagtgccggcagggaatgtcatatccctgccggcacatttacagtgtttataactgctgcttttttacgaacaatcctgacattaatttcccggtccgatgatcacagaccccggtccctccggcacgtattcctcggacgatgcgcccggataagctgccgtacttcccttggtgctgccagggtaagctgcggtgctccccttggtgctgccaggataagccggggacgttccctggcttccgggatacgcagccgtggtccccttagaggcgcccggataagctgcgctggttcccctggtggggtcctggcccggataggtgattgcgcctggtccggttgtctggtcgccctctgaggtctcggcccccgggaatatgctgcctgagctgctctctcccggccggccgggatggacggtaccggatccgctgctctcccccggccttccgaatatatcatcctcaggcggatccagttcattgccgaactcgtcggtctctatctccaaatccgtctcgccgtcaataatggactcatctgtcccggacgtgctgctctcagactcattttcttttgtctcttccgttgccttggtcgcctgagtgggcttggggatatatcctccgtctgttcccacatggtcgattggcttggcttcattgtacatgcctgtatccgctgatattttggcactgatcttctttaccatatcactgggctggtaattttcatccccaaacaggaactggtggagaagggttacattgctctccagtgtctggggaatgacgcaggcgcccttcttgcccatattggcatcgcttctggctgccgggaatcccatggtatccgctatggtatacttggtcagatttctggctgccggtataatgtcatcaatggtaacactggaaagaatctgggggaacactgcctccatgacattgtttaccaccgcaaagtcggatttcttgagtttctggaaacagaggtctatgatttcccgctggcgctctgtcctggcaaagtctgtatccatcttacgaagccttgcgtacgcaactgcctggacaccgtccaaatggttgagccccgcctgtttcaactgataggaacctactccggtagcctccacagtctccgtaatataggcattgatatagtaaaattccgccttgctcagctccacatccactccgcccagaatattgaccgcatccaccactgctttccagttaaatgtggcaaaatcatctatctgcaggtccaggtttctgttcagcgcctccactgcctgctcaggacctcccaggaaataagcctgattgatcttattgtacagcccgttgtcgcttacactgagatatgtgtccctgaacacgctgacaagcttaatctcgccggtgccctggtcaatgttgcatatgatgataacatcggcgttattgccttttcccaccgagttattccggctgtccacaccaaagagggcaatggtccagtatccctccatctcctccaccttcccctgagggatattagggttagtcacctgggccggtttaaactggcttggctgaatcagactcatcttattctgcgcataccggtaaagcccggttcccaaaaggaataagatttccagtatgatgaatacaattatcaacttacggcggcgcttgatctctgctgctgccggatccgctgccgccgcttccctggctgccctgcggcctcctgctccgcccccgttccttccgaaagacgaatccctgcccttaccggcgccaaggtcttccgccccggcataggaccggctgtatgtgcggctgccagtctcaccagcccccaaattcccggctgccgtcctggtaccttttccttcacctgtataccttggccgttctcccggcctgcttcctgagactcccggccttccgtcaggccggtcccctgtgaatctggggcgttcaccgctcctgccgcccgcgcctgtatatccggggcgttcaccggtcttgctgcccgtgcctgtatacccggggcgttcaccggtcttgctgcccgtgcctgtatatccggggtgttcaccggtcttgctgcctgtgcccgtatatacggggcgttcaccggatccgctgcctgtgcccgtgtatccgggacgcgctccgcccttgccgcctgtgcctgtgtatccggggcgctcaccggcccctccggccgtgcctccgggacggcccgccggcttctctcctgcaaaacgcggacgctggcctgtctttccctcaccgcttacaggacgttccggcatcctctcacctgcataggtgcttcgcattccgccgttctttcctggtatgcccggggtacgctctgcgtctcccgctccggcatagcgcggacgggcgccggaaccggagctgggcccggcagccgaaccggagccgcggccatctgatgcagtccttactgacgccctgccggcagataccggcgttccctgcctggatccgcctcccgaacctgcgcggcccgcctgtccggcgccccttatctcctgcccgctgcctccgatacgcccgcggggcattgtatctgaatcagccccggcaccggcgcccaaatcgcgcttcctgctgcggcttcttaatctctcttcttcctcatcaaatccattgtcaaactcacgattcattcgtccatcctcattccatcacgtaaaccaggcgctaatcattcataagcagccccgctcccctgacccgcagactgtatccgggcacggctaaaacgcaggagcattcttaacgcaaacgtcatgcatatcaatatgcatttttattaataaatcccttgaaaacagtgagaaacataatcttgaagtcaaaacccagactccagttctcaatgtaataaaggtcatgctcaatcctcttggtaattgatgtatccccgcggtagccattgacctgggcccagcccgtgagtcccggacgcacctgatgcttaatcatataccgcggtatctcttctttaaatttttccacaaacagcggccgctccggccggggccccaccagactcatatcaccaatgaggacattaaaaaactggggcatctcgtcaatgcttgtcttgcgtatgaaacgtcccacaggcgttaccctgggatcatggggcgttgtccactggctgcgctccctgcccgggtcctgaacctccatggaacggaacttgtacatcttaaagggacggttgtgcagccctatcctctcctggctgaaaagcacgggccctggtgaagtgattttgatgagcagagccgtaaccagcatgagaggcgaaaatacaatcagaccaaacagagcgccggctaaatccactatccgtttcatggtggcgttaaacaccccggtaaggggcacatggcggatgtggattaccggaagtccctgaaggtcttccatatagggaatcgtcggtattatgttattataatccggtatgaactttgtatgcacgcctgatttctcgcaggcagccacaatctgttccagattagagtactctttgatgctcagggtaatggctatttcgtccagcgtattggacgccaggaaatcctccagatgattggtgggtcccagcacctgtacctttttatatgcaaagccggccggccggtggtcatccaggattccctggacatggtaaccccattccggattgacgctaaccctgtcgatgaacccttcggccgcccggctgtagccaataaggagcacatgcttctgattatagccgttggtccgcagggagcgcaggaagatgcgtattgatatccgctctgcttccagcaggatgatattggccgcaaagaatgccagaatcatctttgtggagaaatagctcagatggcttacgaaccttcgcaggccaaaaagcacgaacgtaaagagcataaggccgatgacattggccttgcagatattggccagttccgaacgccgcccctgaatccgtttgggcacatacagatggaaactggcatatagaatcaggtatatgggcacgataaaaatgagcgccataaaatatacctggggctttagcacgccttcgtctaagggcagtacctttccgctgatgacaatgaaccatgccagagcataggccaccacagtgaccagtatatccagcaggacatgcatgcggttcagccttttctggttatcttttatcattgtatttcaccttggtttctcagggaatcccttcttaccgtaaatatcgttgttattatacatgataagccgtcattattctataacatttctcttaatttcgaaaaagttcataatttagcaatctgccttgcggcaaactcataaacatagataagggtccctgtaatcaattcccattcaatggccagataatttttaagccgttccctgctgtaaggcaccttccggcaccttttagcggttgccaggccttccttcacgccagccgcataatcccttccaaatccctttttcttaaaaaacatgtatttaagtcccattcccaggagaatcggaaccaggttcaccgccagctgcaaaaggggcatgtttttataattcagataaatattattcctggcagccagctttaccttgaagggattgtacttggaaccgctggtgccgcttcccacatgataaaccatggccgtgggacagtagatgttgtcatatcccgcaattctggccctgtagccaacgtccaaatcctccaggtacgcaaaatgcatctcgtcaaagtatccgatttcatcaaacacctcccggcggtaaatggctgccccggcgcaggccgagaagatgcggcaggccctgttatattttgcggatgagcgtcccacccctctctggtatgcccagcccaacagactgtacatatccccggcatcgtccatcagctccttgcggcagagctgaatcatcttgcagctgacggaaaatatctttggggagcgctcaatggccttaatcatttctcccacatagtggaagtccggctccgtgtcattgttgagcagaatcacatagggagtcgccgccgccttaaggcccacattcaccgcgcctgagaacccggtgttctccggcaggaaaatggccggaatctcttgctccttcagccactccacgcttccgtctgtggaaccgttgtccaccaccaggatgtcaaaatcccggcaaatctgcatgctgagagctttgaaacagggttccataaacttaagcccgttataattgggtatgacgatggttacctttctgcgcctgcctgttcttcggccggtttcattgccacgtcccgcttcattgccgcatcctgctttattatcgcatcccgcttcattgccgcgtcccgctttataatcgcattctgcttcataatcatttctatggtcactcatgtgctttcgtatcgtcctccggcgcaaactgttcgtaaaccttaaggtcataaggctcacctattttttccttcagaaggtccctgagcgcgaaattagatttgcgcagcgtcaggttggggttgtagcaggggtcgccattttgaatgatatcaggccacttccgtatgaaaatggctacctcccggttaaagcgggctatcttttcaggcgtatcctccagtcctctggacttggattcatagtggtaaaagcatgaataaggcgcatacactaccattttccccagggcgcgtactttcatgcagtaatcaatgtcattaaaggccactgccagctccgggctcaaacctcccacctggtcaaagacggatttctttgtcatgaggcaggccgccgtgacggcgctgtagtcctgggcgcacatggctctgtggaaatagctgttctcggccttatgaagtccgataaatgtatggcccgcaatgccgccaaagcctatgaccactccggcgtgctgtatggtgtcatccccatagagaagtctggctcctgcaatgcccacatcctccctctggcagaatcccagcatttcctttatactgtcctcttcaatcagctccgtgtcattgttgagcagcagcaggtattcaccctttgcaaaggaggctccgtaattattgatggctgaatagttgaagccctccttccaggtaaccacccggaaattgatgtgctccgcctgcatcttatcatagtaggcgaaggtttccttctgggaactgttattttccacgataatgaattccaggttccggtatgacgatttctccatcagggaccgcacgcacacatccaggtcctggctgtggtccttgttggggatgatgacagacaccagaggttccccctgtatctcaaaggtggtatggtaaatgccgtaatccacgcccttctccaccttcactgccggaattcccatacgctcatagtgggccatgatggctctggatccggcctcaaaggcatacatcttgctctccgggttgctggccgtggaattctgatggcagcgccagtgatagaggacctttggaatatggtataccctctttgccgcctccgtacaccggaaaatgaaatcataatcctgggcgccgtcaaactcctggcggaatccgcccacctgctttaacaaatcctgccttatgacgaacagatggcatatataattgacgctggtcagcaaatccgggttgaaatccggtttgaaatgagggtcaaacagggcctttccatccatgtccagcttatcttcatcagaataaataacctggcagtcgggattttcattgattgccttcacgacctcataaaaagcattgggaggaagcgtatcgtcatgatcggccaggatgacaaagtctcccctggccatatccagggctgcattggtattgcctgagattccgcggttgctgcccagaatctcatagcgcacacgccggtcacggtccgcgtacttcttaagcacgcgctccagcccctcacccctgggacttccgtctgcaacacatatctcccagtttgtataggtctgttccatgatagagtccagcatttccctgagatagcgctccggggtcttataggcgggaatcacaacagacagcatgggctcaaagtcaaataaatgctttctctgctccgccagctcctcgtccgttggtttggtcagctcataccactcgctgtaatcataatcattgtcaattccctgcagcttgtgctttgacttgaccacaagggccttaaggccatgctccttccaaaaatccatggccacatggactgtctccatgttcatcaggtccttaagcttctccatgcgcttgtgggccacgctggcccgcctggcaatcagttcctcattgtacttgatttttgcctggcgtccctcacagcggatcagcaggtaataatccttcccccgctcatagggaaactggatgtcaaatccaaattcccggtcatagaccttcttaaaatatatctggctcacatcatccctgcgggtatttacatgcttaaattttaccggctggcgcttctcatcctccacccggaaggtggccttgctgtcaggggatttacctatagcccatccgttaagggtaatggaattctcccggatgcgtaccacgtctatcttatatttcatgcttcattaccgccctttttctcttcctcgttaaaattaatacgctcttcctcaataaccagaggccgcttcatcacccgctggttaatactcatgatatactctcccagaaaaccgatgaagaacagctgtaccgaccccaaaaacagcattccgatcagcatgggcgccatgcctgccgggaaacggtcccaccaaatcagcttcattaccaggtagaccatggcgatgagcatgctgacaacagcgcatatgctgccgaaaatcgtagccagacgcaggcctgcttttgtataggaagtaacgctgagcatggcggcgtcatacagacgataaaagttattatgggtcttacccgccctgcggcgcggctgctcatagggaatctccttgcggcggtatcccagctcagccacgattcccctgaggaaaggagtggggtcatccaggttgcgtaagacctcgatgaactccctgtcatagagaccggaaccggtaaaatgctcaatctgctccacatccgacaatttcttgatggtcttgtaatagcagcttctgagccagtacatcagacggttttccttgctgctggtcttgatgccgataacgattttatatcccttctcccactcatggatgtatttaggtatcatttccacagggtcctggaaatccgccaccatctcaataacgcagtctccggtgacctggagcattccgtaatagggggaattgaactggccgaaattccgggcattgagtatggccttgatgcgcggattgtccgcgcacaggccccggatgatatccctggtgccgtctgtggaatcattatcaatgaataccagctcatagtcatactgcggcagctctttttccaggatttccgtcactgccctgctgatagggcctacattttccgcttcattataacagggaatcaatacgctgattttcttcatatctctctatgcttcttctttctctatggtttcttcgatgccttggcggaaggtatagcgctcctgccatctgccgcctgtgagtctcttaagtctggtaatgtcaggccggatggacagggcgccctctttggcctgtacaaaggtcccgtactccagcgttcccttaaatcctacgatatcatggatttcctcaacaaaggaccggaggggcctggtatcctggctggctatgttgacaatagcgcttatgggactgcgcaaattgtccttttttgaaccaggttcttcatttacggcctgcctgtataattcatatactgcctgtaccgcatcctcaatatacataaaattccacatatgcctgcacgcgctcagggaaaccttcttatcctgccttaaatcccgcaccagggtggatatgatggaccatggatgatccccgcagccgtacacactgaaaaatctcagatggtaatagtgaaggcccagacggctgcaaaggggagctgccttctggtaaaactcccattttgcctttccgtattcattgatgggacggcagggcgcttcctcttccatgattccgtcaacagccccgtattccactctggaaccagcgtccatgaatacccggcatcccagacgtccggctgcctccacacagtccagggagcctgccacattgcgggcctgaacctccggcgagtctatctcctcccggttcacgcctccccaggccatatggaaaaatccgtctgcatgtcccacctcagggacgcattccagaacatgggccaggtcgcaggccactgtatgcagtctctcatgaacaggaagggcgtccagatgaagggaacccggacgcaccagggcgtacacatgggccccctgctccagaaacaccctggccagattgcttccgataaaaccggttgctccggtaattactacgcgcatgttatcatccctcctaaaccatctccagatggttggaacgcatggccctgatttccacggcggtcccgaacttctggcgtatgcttgccgctatctcatccgtataaccgggggccgtgattatgatggcatccaccgggtgttcatggaaatggtccggtccaacgatgggaagatgggacgcaggggcaaactttccctgcttaaagggtgcggaatctatgatataccttgccttttcccccagcttggtagtggctgcaagggtaaagccctggtggctggctccccagatggccaccttcttatcccaggcatccagatacttcatataagtctccatctcccgtttcaggttcacataacactccagcaggttctccgtatccatctgcggacgcttccttacaataacggaaagggtgtccctgttgataacctcgcactcttccacctggaacccgttgcgctccagaaggggggtaagggtctcaaaggtgtagtaggccagatggtcccgtatcagttcataatagctgttgtggtccatgatatattcaaagcttgggactgtgataagccccatggcatcgtcctccaggttgcggtatatggcctggagcatggtgctggggtccggctggtgctccaggaaattaaaggacaggaatacgtcatacagcccgccggcaaaccgcgtatcctctgtctccgtaaacccttccgtcacatccagcccctgggcccttgccagctccaccaggtggtgatcatgctctatgccgtggacctccaccggaaattccgacagaacctttaagaattctccctgaccgcaccccacttcgatgaatttctttccctccagatgatagctgtcaatgagatgcttatactggtatctgcgcagctccaccatggtctttgaaaagccgccggcccgaattacatcccggtaatagtccaccggctcacagtcaaactggaccagtccgcagcccatacactggcataaatccagggtcagtccccggtcctcctttaccccctgtgcatccggcatatgctgggccgaggcaggcatattatctaacgtaagcagcggcgtctcccataacggggcgccgcaggcgatgcatcgtttcatagacaattctccttatataatccaatcatttccctgattccgtcctcaaacgaaatctcctgggcgaatcctgctgcttccttaagcttcctgatatccggcaccagggataccactccctctgcattgggcggccgttttccatattcataggtgcccttttcaccgcagagccggtgcatctgttcaatgtacgacttaagggggcgggtgtcttctcctgccacattatacacgccggccggtactttggcaagcagaagccctgtcagggccctggccgcatccctcacatgaaggaaattccactgctgggtacatgccccaagctccatcctgcctcctttaagaaaggtattgaggcaggtggacaccagggaccagggatggtctccgggaccgtaaacgctgaatatcctggcatggatataatcaatccccagggcctttgcctcttcccctgccctgcggcatacctccagcttgtcctttccgtattcagagacaggatggcacaaaatctcctcgcccataacgccgtccgcaatgccgtactcggcctgggagccgcaaaaaagaaacctggcgcaccccagacgggctgccgtgtgaagggaatccagggcatacccgatgttgcgggcctggacatgagggtcctggcggttggcgctgccggccccctcccagcccagatgaagccacaggtctgcctttgttttggggtcagaacgggattttaaaaccggacaggagaccagttccgggcaggcatccagcttaccgatgtcctttagggcaaagggaaggacggtaatgcgccccccttcttttccggcttcttttccagcttcttttccggccttattgcctgtctcttccccagtctcttcttctgtcttttccccggcttccgccccgggctgttcaagccggcctcgccccggagagtccggccttaccacggcaaatacatgatggcctccggccagcagctcttttgtaacagcctttccgataaaactggtagctcctgttacgattacacgcataacatatactccttcttatcccggatcccccgcaacaggcctgtcctttggtctgctggcaggtctatcccttgatcctgggaataatcatattttcgtccatctcctcatccggcaggaagggcgacaggtcctccaggggcggcgacaccatggtgccgtccggcagtctcttggcggatgacttgggttcaaagttctggtccatagacacgaatacctcgcagatagcaggtccctctgccgccagggttttctccacagcctcccccagctcgctgttgtgccttgctgacacgtaggggtagccgtaggccgctgccagcttatccagagccgggaagctcaaatccccgctgtccacgccgattccaatcagcggctccccaaagaaattcttctgggtctggcggatggaatggtatcccccgttgttaatcacaaatatcttgatccccattctgtggtggatgatggtctgcagctcctgaagattcatctgcatgcttccgtcccctgtcaccaggatcaggtcctccccgcttctgtccccgccttggctgtagcagcccttatccctggaagcggtccaggcgcctatggctgccggcaggtcatatcccatggaggcaatggcggaattggtgatgaaacgctggcccttcttaatgatataggcgtgtccccccaccacacaggcggagccattgcccaccaccgtcacctgcccctctctcaggcggctgctgacagcatggataaacgcgtacacattggccggttcctcatccgtatgggcaaagtgcttgggcagtataacaggatatttctccttccacatggcgcaggttctgctccatgtcatatccctgaggccctttcctccgtcaaacacctgtctgctgcctggacggctgacgctctcagggagatttccctcttcctctgccaaaacgcggtccagaaccaggtccagctgttccagaagatcctttgcatcggcatggacccgcatgtcgctgtggactgacggcttcttcagctcttcctcatctatatcattgacaatcacataagcctccctggcccatgtctcaaagttatatcccacctgccggatgctcagacggcttccaatagaaagcaccaggtcgctgttttgaatggcaaaattcccaggcctgtcccccatattgcctgcacggcccacgtacagggggtgggtgtcatgcatgatatcttcgctgtcccagcccgtaatcacgggaacgcccagcttttcggccacatccatgaacaaatcatgggctcccgctatgcggattccgttgcccgcattgatgacagggcgctttgcagcccttatcttatctataatagtccgggcggctgaaacatccacctttcccggcagtacctggcggtgttctccctttcccgcttcgtcctccggtatcccgtgtcccccgtcctttccggcccagccgtttcctccggcctcgtagtcagccgcgtcaaagccaggaagctcctctgtctccacaaatgctccctgtacattcaggggaatatccagccagcaggggcccggacgcccggaccgggccaggtaaagggccttctccagacagtacctgatcctcatgggatcaatgaccatctccgaatactttgtcatacagtcaatggctttacagatatcaaactcctggtcgcccatggcgcggatgcccacaccggaccacctggccgttgtatcatagcgcacctgccccgacagtaccagcatgggaatggaatccagccatccccccaccacaccggtaattgcattggttcctcccggaccggtggtgacgcacagcgccgcgatgcggttgtgaatcctggcataagcctcagcagccatggcgcatgcctgctcatggtggttataaatacagtgaagcccctcctggtgccccaggccgtcatccagatgcatggcgcctccccctgtcaccatgaaagcctggctgattccctcctccaccagcttgcctgctatataattggaaatcttcattttcataaattaaggtcccccttccggtctatcaactatggagagtatagcataaaacgccttaaaataatactatattttctcttacaatgaccgccggagcggctttaggggcccccctccagtgccttccataacttccagcaaccatcactatcattacacattcatgtccgttataataaaccacgtaatgcaacaccggattttcggccacagacaaacacacatatcaaaaaggagagattcattattatgaaaaaacagatcaaagttctggctgtattatccactgccatgttcatggcagcagtaacccctaacttcatcggcaccgcttccactgcttacgcaaaaaccgtgggctggacagaggaaaacggaaactggtattactatgattcttacggagaggcaatcaccgatacctggaagaagaatggcgatgactggtactacctggattcagacggaatccgcgccgctgacagacagattgatgagtattacgtaggagaagacggaaaacgcgtgagcatgaagtgggtttccgtggaaaatgaagatttctgggatgaggacgatgctcctgaattcctgtactactattatggaagggacggcaaggccctgacctccagatgggcttccatcaatggaagctggtattatttcaacgaggacggtatcatgcagaccggctccatcaccgtagatggttacaactactatctcggcgaggacggaagcagaaagaccggctggattcttctggcagatgaaaccgatgatccggaatacgttgaatcatggtactacttcgacaatacgggcaagcgtattgaaaatgaagttgacaaaaagattgaaggccagtactacacctttgtggacggccgcatgcagacaggctggtacaagcttcctgtccaggcagcagcagagtccggcgaggcccagacagctaccccttccgaggcagctcctgtgtctgagcagaccgctgccggctatcagtactacgatgaggacggaaagcgcgcttccggatggagaaccatcgagggcatagaaggactcagcgaagaagccgagctttaccgcttctatttcaagaacggcaagccctaccatgcagaaaagggtcttgaactgttcaccattgaatccagaaaatacgcttttaacacaaagggagaaatgcagaccggcaagaaggtggtaaacctggaggacggcaacgtggctaacttctactttgatgaagagggcgttatgaagaccggcaagcaggtcatcttcgatgaggacttaggcgagacccagaactggtatttccacaccgacggctccagaaagggccagggcttccacggcatcaaggacaatgtgctgtatgtatacggcctgcgtcaggaagctgacaaggacctgcgctttgcacctgtagagttaaacggcaatcagtatcttgtaaacagcaacggcgccgtacagaaggccacctcttcctccaaatcaaacgccatgcctgagcttggcagcggctacaaggatttcaaggacgagaacgacaaggtatggaccgtaaacacagaaggtgtcatccagactcagagcaccgcacagtaacagatacacagcaaccataaggccgcccctgcatccgttcatttaaccggcggcccacggcagactaaccaattagtctgccgtttttttgtccaatctgacgaatttacaaaaatcgcaaaaaaaagtggtatattttgcgatttgaaacgctatatatattaataagtattaatcaggagaggacattatgagagaacttgctgttttttattgccccaaatgcggacactatgcctattatcagacatcccgtcatccccagtgccccaaatgtggcacccaggaagccatgcacatggtcaggatgcattactcggaattcatgcggatgtcctgcgatgagcgtgacgaatttctctccagggaaatcctgaagaccaatccgtcccttatcacccggctgaccgaaccccataagcgctacaacagccgggaaatcattgctgaaatgaacaacgtaatcatgaacctggatacagaaaacaaaattctcagcgatacggtaaaatggatgcacgatactatatgggaactgatgcatgagaaacgggaatccggccagggcaatgggacggcacccggcgactgcggaggttaccgggacttccgggactgcgggaactgccgggaccgggaaccatcggaggaatgcatggaggtaacagcgcacaccggacaaacagaggcagcatacagtgaggccgcagcagccgatatgtcacagaccgaagaggcagaaaagggatacaaacgatagctggctgcagctccgggaaatccaaatctgaaaaccaaatctgaaaaacatataaatttccaactttatatatcttttgtgcaaatagtgcgttataatagtacatataagaaatgttttgtgcatattttcatttttaaggttggaaaggagtggaactatgagccataagattatcacgatagcccgtcagttcggcagcggaggccacgaagtcgcccaaaggctgtcagaccagctggggattcctctctatgaccggaatctggtggagatggccgctgaaaggatgggacattctcctgtaagcattgaaaaggcagacgagtccgcactgtcctccttcctggccggctatcagattcccaaggagcctaattccgtaaccggatatggattatccctgaatgacagcacttatgtcacccagaccattattatagaggcactggcccagaagggcccctgtgtcatcgtaggccgctgcggtgattacgtgctccgcagccaccccgacctgattgacgtatttatctgtgcggatatggaagaccgggtgcgccggattatggatcgctacagtttttcagagagggatgctgtcaacgccatcaagtccacggatcgccgccgtaaaaactattacgaaaactacaccaaacgcaaatggggcagcattgagtcccaccagatgctgcttaacatcagtaagcttggcatggacaagaccgtaagaatcattaaaggaatctatgaaaccccataggcatgtttccaactgtccataaaaggcaggcgtctgaaggaaaaaccttctggcgcctgccttgtttttgtgcatctgctttttttcctgcatttattctccggatgtatctccccgtcccattcccgtcttggaaatatacccctcatactgcctcagcgcattctccttaaaaggagcgctgaccgtaaactccgaaccgtcaaacagggtcaccatacgcacactgaaggtggccacatacctgagatttacggcataggacttatgcagccgtatgaaaccagcctggtccatgttgattttggaaaacaaattttctaaggtggaatagcaatgatatgtatggccggcagtcacaatctttacccgccggttatcaccttcaaaatagaggatgtcttttaaaggtattctgtatacggtccggcttgatttgaattcaaagattccggcatcaccctctatcttttcgcaagctttataaaatatattctggaagtcctctggcctgattggcttttttataaaatgaaagggctggaactggaacaaatccagcgcgtattcatccccgtaagccgacatatagacaatcatgctcgtatcattgcccagctcttcccgaatgaacctgcccagttcaatcccgttcctgtccctcatcacaatgtccagaaaaatcaaatcataatgccgctccttgagtgcttcctcaaattccttaccggtgttgaatatctcaacctccagcctgcgcccctctttccatcgcctgatatagtcctccagctggctgcacacctgaaagtcatcatcacatattgctatctgtatcatgcacctgtccccgtaccgcaattttaatctttagtattttacacccccctggtattattaatcttaaaatgttgaaaaaagacgattacacgttgaaatttgtcaaaaaatcaccctcccagggtaatatcctgggccgcgtaccacttaagggcatcttccacatgttccctcttaaagtcaggccagtaatcatccaccacataaaaatccgaatacacggactgcaccggcaaaaagcctgaaaggcgtcgtcttccgccccaccgtataatcaggtcgattctggaaacctcagctgttttaaatcccggccctatggtctcatccttatagcccaaatcccactcccagctgtagttcaccaggaagttaatcttcatcccgccttttccaaaatcatgcctggcggtaaagggaagaagctcatggggaaacatgggggattttgtatttcccagcacaagcaggctggcatcttcctttgccagctcctcaaccgccgccacacaggccctggtaaatgcctgtctctgggcggaaggacgctttgtgttatctgtggtaaaaccataaaaggacatttccccaatccccagctcccggcacatgcggtacagggacattccaggtgtaatcccgtgcccgtatccctctgatttatccattccctggcctttggcccatctccggtttccatccgggatgattccgatgtgttttggcagtctcataccatctcctccattcctgcttatatatggaaagtatggtcttaaatggaaaatctatacaaaaggctccaaccgtgtgttagtcctccatgattttcctgggtttatccgtaatcagattatccgcccccgctttcctgcatttgtcaacagagtaggcgtcattaacagtccaggctatcacttccttgcccagggaatgaatacggctcacagtctcaggattaatgaggtctatgctcagcacaaaattgtcagcgctggtaaatgcctccggctgctctatggccttggatgagataaatccagtctccagggccggggccagctgctttaccgcctgaagggaatggtagtcaaatgaagtgatcatgcactggcctgccatgcccttgtcctgaatcagccctaccaggcgcgcaataaagtcctgggtctggtggtcattgacttttacctctatattcagctttatcttatccttgcagtaatccaatacctcctccagcgtgggtatcctggtatccttgaaaaacggcccccaatggctggcggtattaatttggctcaattcctcatagctcatatcccatatcttatccggctttcctgtcatcctcatcaaatccgcatcgtggaaaatcaccaggaccccgtcttttgtctgcgtcacatccagttcaatccagtcagccccattttccactgcggctttaaaagccggcatggtattctccggcgcctgggtgttgtcccccctgtgggcggtgatttccaccttgtctctccatccctccccagtccggtcctttgccaggacccggaccggaatcatggatacaatcagcacagcgcctaaaagggctgctgccatgtgtcttttccgtattatattaacactccttactatactaacactccttactatactaacactccttactatactaacattccgtactatatcaaccttccgcatcgtatcaaagctccatctgtattcattttcaaatgctgtctattccggttccccaccctccgaaacgtcaaatgcaaggcgcatctggccgccgccggcaggacagacaactgatttcatctcacgcaccgtaatccgttcctcccctgtgagccggccgcacaaaaggggcgagtccgggtcatgtaacctgcgttttacctccacctgatccgggctgaaattcgcataacaatatctgcagagatgggggcaggtgttgtaagcgccgatatccacgctcttgacacagccgcattcctccctctgggtactgtctttttttacatccaggggacggcccagcaatccggcaatcagctggtcatcaatacattttcccttctgtatatggaaaccggacaaatccgctgcctccgaacatgtccggacggtcatgccatgccgttctgcctccggacccataaaggatgccagggataccatgtcctcccctgtcattgcccgggtctgaatccgatccatccgtccttttatcttccggtacatatccaggaaactgatgacgcaggtatgggtatatccctccaggctgctgcacagccgtgaaaaccactggaaatggtactccctggtataggacggactgagaagcaccggatcatacctccatatgacacgctcaggccccagcctggccgacagctcccggaaggtttttaccagctcattcttatggggaagtccgggttccacatccgccccatagggtgtcagggtgaactggaaataataggggtatcccagccggtccaaaacagaaagcctctccatcataggccccgggtcctttgtccagaacacaaagcagtccacggtgtcctggttcagaagaatcttgctgacctgcccgggattcatggggttctttacatacaggtacccttcctccagccgtttgaaaaaccagtccgaataaaacgcaggaatgtctgtccttctgctggcactgatgatcatggcggctcctcccttctttgtcttacgcggcaatctgtgtagtctaatataacatatggggtggatggaagcaatctgtgagggaattaaaatccttatatttgcagtgagatatcataaaatccatccggcgggcggaattttattcccccggccggatggattcagctattttcacccgtattatcttatctgcttattttatctccccgctctgctccttggcccagtggtccactatgatacttggagcatacacaaacatcatatgcagttcctcttcacctgtgttatacagagcgtgttttaaattacctggaataaagatacagtccccttcctttaccggctgtttctccccgtccacctccatctccccatgtcccttaataatcgtgtaggactccaccgtctcgtggtcatgttccggtatgccgccgcctttatacaccaccacatagccctggcagaacttgctgccctccatggcgccattctggcccagtattaccctggtgcgccgtccggccggaaattcggtcccctctatatcccatatatttactttttccatttcattcctccagattgtccggagtgtgccttagcatcccgttcagacacactccgggaaatcagattcttcacagactcccgttcaatcagcctgcctttaaaataagtctggctcttgtgtgcgcaggtctgcgtctttatctgctccatcagctgttcaaatatgattcccgccgtatctgccagggaatgacgcagcgtagtcagaggaggatccagatatttcacctgagggatgtcatcaaaccccactacggatatatcatccggtatccttaatccgcttttggtaatacccctgtatacgccgtaagccataaaatcattgaacatgaatacgcctgtgggacgttcctcatggcgcatcaattcaagggttttataataggcgtcatcctcggattccacatcgcggacaatatacttttcgtagtcctctattccgcactccccaagggcttccagtgctccttccagacgttcccggttatattggcggtctttatcattaatataaagggcaatcttccggtgtccgttgtctgtcaggcacttcactgcctggtaagccgcgtcggcattgtcaatattaatacagggggcatccacatcaaaggtacggtttacaatcaccatgggaatctcccctatgtatggtttcacatgttctacatcctctgtggatgcaatatacagtatgccgtctacaaacagatatttaagggttttaaaatactccttctcctttttcacatctcccagtgcatcacacagaatcagggaatatcctgcctttgtagcgcatgcctccatatattttacaacctccggataatatggattcatgatatccggtatgataaggccgatcagcttgctgccgccttttttcaggctcctggcagccaggttgggcttataattcaaatcactgaccgccttcatcactttctcttttgtctctggctctacaaatgccacgcctgacagtgctctggatactgtgctgggagaaacccctgcatattttgcaacatcacgaattcctaccattggtattctcctttaaccgtcttttaccttataataccatcttcacggtaatctttccagacattttcaaaccagatttcctcgtcaggaaggggtcttaccggcctccaggatacgcggcattcttttctgtccgcctcataataaatctcctgcagtacggttgtgtccgtctcctccgtcctgttcctgaaccgctcatccaaatgcgggttaggtacctgccccccggcattatataccagataggatcctctgctgatgcccactctggcgtcataatccctcagggcctctaaatatacaaactggcttataagaagatgcttcagtttatacaaatccttaagtacctccggccccttaatcataaccttctgctccagctgttccctctgtctcaggttttcctcaagcgctgtccgtatcccttcctctgagcggatacatgcaccatatttggtcatcctgattcccagcagccttcgctggccggccacatccgtcatacagctttcagacccgcgcaggacgcgttctccaaaggcagtctcctcttccacctccttcatatgtctgctgaggaactgctccctggagcagggttctcctccataccgcttcacaatatactggctggcgcgtatggcgccgacctgccccgcattcagtgcgcttcctccgggacggtatatgccatgggaaccatttacctcaccgaccgcaaaaaggtgccggatattgctctcccaccactggtttcctccaatacctccgttgttatgctgggcgcacacagctatctccagatactccccggacaaatcaatgtgatggctgctgtaaacttcaatggccgacggattcatatgtttcagccgctcatagggtgtatccaaaagagccctggaattctcaagatattcccttgcctcgcctgccagataccggaacgagacatttcccccttccatcagcggggacgggttatgcatgaaatccagaaagacccgtcttccctttaagactgtctcctgataaacaagcagatcaataagggatgatccctgcccttcaacctttctggggtcaaagggccactgatacccttttaagaaaattgccgtcagaagctgtctgggcgtgtcaaaataatcattcaggaattccctctcatggcttccgtcctgctccgcagacagatatcggggcaggcattgctggaatgtccctgacagattccacctgtgttttacagatgcaattccaaactgggactcagtcagattctttgcaacagctcccgcctccagcagtatgcccattccgcctgtctggctgacaggatatacgctggcctgatacattccagcttccccgccggtggcccatataatgttgactgctgaaaatacggcataccgttcatcgggcgaagcggccttttgtttattcagggcaatgatgcctgccgccctcttttcaccgtccttctcctctgtaagcaggcgtactgcctgatagccgtcaaagaacggtattccccgttcctctgcctggcgttccaaacattcggtcatgtatttggatgtcagcggccctgcggaaatacctctcttaaggggatcatggtccgtcttatatcccacatattccccgctcttattgaaaggaaaaggaaccccgatatccaccagatggtaaaatgccctgagagagcctgcggcctcggccatggcaatgtctccatccacacatccgccctcaaacaaggtctttgccattttcctgacgctgtccggttcactgccgcactgggtcatcttataataggtctgtttgtctgaacccgtattcctggaagtccccatgtaccgtccttctgtaatcagggcaatgtttttctgccccagcttatgaagcgttacggctgcgttaagaccggctgctccggttccgactatgattgtattgtattgataaaaaggtatcctgttaatatccatatgctgaaaccacatcctataaacgctggatgtggaaccctccatccacatctatgtaattgcctgtcgtgtaacagaaatcgtcggaacaaaacgccctgactgcctttgccacatcctccggaactccccatctggcaatggggaacatcccccgtttgattaattccgtatacttttcttccacctggctggtcatatcggtacggatgactccgggccttatttcatatacaaatataccctcaggagacagcctgtccgcaaaaagcttggtgagcatggagattcctgccttggaaacacagtactctcctctgttaacggatgatacctgggaggagcaggatgaaatgttgataattgtcccgcgcttgcctccatacacaggctgtttcatcatctgccgtgccgctgcctgtgtcataaacatatttccttttgtattggtccctattacatagtcaaagctctcctctgtcatatccagcaaatccgcccttaccttgggcgccacccccgcattgttgaccagcacatggatttccccgaagtgttctgctgcttcccggacaatacggattctgtcctcggactttcctatatcaccggcataccaggcataggagatacctgcatctcggagtgttctggtactttccggataaaaggattcaccgcgtgtagccatgacagcaacctgataaccgtttacccccagttcccgcgcaatggccaaaccaatccccctgcttgctcctgttacaagtgctgtcttcatatccgtttacctcctatttcataatcagttcaggcagcgtcattgtcagcgccggaatgaaggtcacaagcagtaatgtgatgagcatgggaatatataacggcagcatggcctttgaaactttttcaattttcatatttccaatggcgcatcctgtaaacaatgctgttcccacaggcggtgtacataatccgattcccagattcagcatcatcatgactccaaactggatgggactcatcccaaattttgtcacaaccggaagcagtatgggggccataattagcaccagaggcgccaggtccataacgcatcccagcaaaagcagaatcaggttgatcaggagcaataccacaatcttgttgtcgctgatgccaagaagcaggtttgtggccagggtggggacattcagatatgccatcacccagccgaaggcgcctgccgcggcaataagcgcatataccatggaaagggttttaatggtatttcccagcactaccggaatatccttaaagcgaagctccctgtaaataaaaaatcctacgaacaggcagtaaatacaggcgactgccgctgattccgtggcggtgaaaaaaccagctgatacgccgccgatgataataaccattgcaagcattgcgaaaaatgtatcctttgtaaccctgagtgcttccttaaaaggcagcttctttcctttgggataatgctttttcttggaaatgatataacacattcccattatgaaaacccccagcataattcccgggatataaccggcgcagaacaggcttcccacagacacgcctcctgccaccatggagtacagtaccatgttgtggctgggcgggatgatcagtccctgacaggagctggccacggtaactgctatggaaaaatccttttcatatccagcctcctccatcatgggtatttccagagctcccagggatgacacatcggcaatggcagaaccggagataccgccgaacagcatggatgccagtacatttacatgtgccagacctccggttatctgccccacgcatacatttgcaaaggccagcaggcggctggatataccgcctgcagccatgatttcccccataaggatgaagaaagggattgccagcagtgaaaatgagttaagctgtttggacatttgctgcaccagggtcatgacaggcacctggatatacagcatggtgaaggctgtggatataatcattgaaaaggtaatagggcatttaatcataataagcagcacaaaggttatgagaaggattgcgatagctatatttgggttcattctttttcctcctcctctctgttaaacttacccgcatcatcggttttcttgtatttcttcaggcccattatatccaggaccgtaaagtagataatggcaacgccgctgaccggtatcataatatacataagagatgacggccattttgttaccggaagcctcgaatccatggtagacagcaccatccggaccccgtagacagtgaagaaagcgcctaccagcagcgtaataatccggttcagcacatcaatcacattcctgatctttaccggaaacttatcataaaacagctccacgccgatatgcaggttcttttccgccccaatggcaatgcccaggaacgccatccaaatcgtaagcagcagcgccacctcctggttccagcggatattggtccgcagtatattcctgcagaatacctgggcgcatatgattacgattacaacggccaggacccaccttgcataaccatatataaccttgtaaaacagattgaaaatatcaattagtaccttctttattcctttcagcatcttcagtctcctatatgccagtcccctacttgcctgcttctacaatctggtcaatgatgtccttataggcgccgccttcataggaataccagattggctcacaggcgtcctggaacgcctttaattcttcctcagtcaattcagtgattgtgacatcctgctccagtaatttctgtttggattcttcctctgcctctgcccacagctccttctggtactcccaggattccagagccgtgtcatcaataattttaagatcttctgcactcagtttttcacgtgacttttcgcccatgaccaggatgtcggccgaccttgtatgatggtcctccacaaagtagggagccacttcaaaatgggactggtccagataattgacgatggaattctcagcagcgtccacaacgccggtctggagcgcggaatacacctcggaatacgctgtcgctaccgactggccgcctaaagcctccaccatggacatcatcagttcggactgctgtactcttaccagcatacccttcatgtccgcaggggaatggatttcctttttggtgttatagaaacatctggttcctccgtcatagtaggtaaggccgtaaagcttcttttccttcatcttatccccgcgcaggattcccataccgatatccccgccatgtaccttccagaaatgctctgtatttttataaatataaggcatcattaaggcattgtactcatccacaaaattagtcatggtggacagatcggcttttacaatatccatgccgccatactggagctgctccaggcaggagatggcatctccaagggtgccgttgttgtacacctcaatgttgacccgtccgtctgtgcgctcccttacctggtccgcaaaccactccacggctatggtggtacagtttccatccggctggttattggaaagttttaaggtgactgtgtcaccggatgcctcagtcttgctctcctccttattctcctcctgtgcggcagtatctccttctgttttttcctctgccttagcctctgtctgtgtctctgagccggaggatggtgccgctgtggttcctgcatttccccctccgcatgctgtcagtgtcatcacaagacccagtgccatcataacgcttcttttcttcattgtattcttctccttttattcctgcgcgtaacgcgcataattaacctgttacctggcagaatacccgccgtctatcggaatcatgatcccggttatataatccgatgccctggaggcaagaaatactgccggaccctcaaaatcatcgggggtcccccaacgtcccgccggaattcgctcatccatgggctgccgccgctttgaatcactccagattgcctttgtaagctctgtggctatgtagcccggcgcaatggcattgacgcatataccgtaaggtgcaaattcattggacaatgccctcgtcatgcccatgaccccgtgtttggagcaggtataaccgctgacctcaacacctccgaaggtggtaaaaagagaggcggtattgatgattttccctttcaacccttggtcccgaaagtgaatggcggccttctgggacaaccggtacggcgccttcagattaacagcaattaccttatcaaacatctcttccggatattcaaatgcattcttccgaaactgcatacctgcattattgcacaggatatccacatgaccggcttcttccaaaaggcgtatccacacctcatccacatcagaagaaactgacaaatccacatggtaacaccggcactcccgccccagattttcaactgtccttctggtatcttccaaatccccgatatccagcgcaatgatatctgctcctgccctggcaagcccggctgccatgcctttgccgatgcctgttgcacagcctgtaatcactgcctttttccctgcaagagaaaacaatgaatccatatgaaatcttaacctcccctcccatgaaaacggtttcttgtatcgttatgtacatattaactcatgaaaacggtttcgtcaagagtaaattgtagattttttaaattataataaacaatataataaaaatggaaagggatgaagattttacccttcttccctttccgtctctcctgtaatccctgaaatctattattaattgtttctccctgttcatcccttctcccgcttcgccgccagcagcctgtccaggtaaacagacttgaactgtttgctggccatggcctgcttaagcggcggcagctccaggatagcactgaacagggcggccatggccctgtggttggaaaacgcctggttgtcaaacaccagatttgccaatgttcccttctcaatggcctgaagaacaaatctgtgggtgctgttcaccggtgtgatgatctgctccgtcctgcgctccatgtgaatggccttgacaccgcagttcctggcacatacgccgcagcccagacaaatatccttatccaccacggcccgcttccttccgttttctccttcctccatggatatagccaataccggacatgtctttgcgcactttccgcagccaacacactggtccccggtaatatcaggaatataattggtggtggccaccggctgcatgggactgaaatgcctggcagcctggagcgcctcacagcagcacccgcagcagttgcagataaaagccgggtgctcccgcacattttcccctatctgtaccagattgctggcgtaggagcgttccagcgcatccagcgcctcctccctggagataagtctgcagtaatccccgtgctgggccagggaacgcgccacattgtcaaaggtcaggcatacatcccagggagcgttaatctcgcagggatggcctgcgtgagacattttatgacggcagtagcatagccccagaccgatatactctgcctcctccacgatgtgggtcgcccgctcataatccagaatgtggttcatcttgtcattggtcagaaccggctcctggacaaacacacggcccagctttgtctccgtggcataaaacaaatccttgatgaaatcctcctccacattcatatactggtaatacaattcactgagatacttttggtcaatatctcccctggtcctcatcagagcaaattcaataaacccggccattggcgggggcatcacgaatttccgcacccccttgtcccaggagtccaccagcaatgccttgccgcacagatgatctaacagcttttccgccttatactccgaagtcccccatatctttgccgccttttttatggtaaacgggcgaaccggcagcagcgccacccatttggcctccttttcagaatataggacctgcagtatcttatacagtgtctcagaggccggggccccctgggtaaaccagttgatacgttcacccaggttccggtatgcgtcacgggttgtaagatgtcccattgtctttacctcctccttggattttccttgattgttcccattttttcctctgccataccgcggagtgactgaaccctcattcctatcagataaaccgcgtcatgcccgggcatggaacaaccgcttcaccatctactttagcactgcaaaaaataatattcaacagaaagtacatcacatgcttcctttccacaaaatcctgttttgtttcgttgttgtataccattcatccgccaaatcgaacatatgttctgatttttcttgacaaaatcccccctcagtgatatctttaaaatacatcacagatttccttttccacatgagaggtggaaaatatgcaatattacatacgcattgataaccggaatgtatacgtgtcagaagaaatttataaactatactgcaaaggcgagcggaaggagcggtatttccgggaatcagatattcataacaagacattttattataatgcactggacacagaagattttaacggctgtgatctgtttcaggacacccgagccaagcctgtggatgaacaggcagaggaagctctggagcgctctctgctctttgaggccatgaaggacctggaccccagagagaaagatatcatacgccgtatttactgttacgaccagtccctgcgccagatttccagggaaaccggagttcccgtaaccacccttcattaccgtcatggaaagatcctccgcaaactgcgcagcctcatggcctgaagggaaggtgctgcacagattctcacaggcatttaggccaaaaggccgcccgggccgacattcaggtatctgtttcacatgcctgtcggctttggacggccttttctatccggttttaatcgaacatatgttctgtatatcggatgaatcttgtaaccaccccatgaatgcttttaaccggaacaaaggaggaatctggtttgaatattgttatatcaactgaacataatcagcttttcagacaactttacgcagctgcagacgcagccatctccaaccggcatctgcggggcatggagctatatgccttcagaagcctgacgccggaagaactcatcaaggaagctgccggctctcccgcagatctgtggctcatgttctttgacagcgacagccggcctgactggccggatgtactggacaggcttacatctttcagcagtcaaattatggtctgcatagtgagcagtgattacagcaccgcagcccgtctcatcaacagccactctgtccgcggcgttgcaggttatatacatcctgtccatgacaacttagagcgctcctgcctgaacatcctgacctatctgaaccgccgtgtaacttccgcagatggatttctaatcgtgcacggcagcagccgtgacacccggctttccttttccagcatctattatatagaaactgtaaaaggaactcatatgtgcaatatacactgctcagacggagtatataccttccgttccggcataaaagagttgtcagaaaagctgaagccgccctttcgtcaggtccgggcatccaccatagccaatctgtcaaatgtccggtcctttgaaccaacccagggcattctttcctttacaggcggtatttcatgctgctgctcccgcagctacaggcatgatgtatccgattatttccgcaggcatccgcgtcatgtgcatgcggaaggggatatggcggaaaggggacccgggtgacgggaaagcggcagggagagaatacggcagtgaaaagactatccgaaacacataaggcggacactttatgcagagcacattaaaagggcagagtttcccacctctgccctttcctttcacatctatctataattatctgacatttccctggggcagtaccaaccaccgcccttctgtcccctgtcatgataaaaataactgccgttccatcatccgccgtctggtgagtccctccagtacctttcctgccgctttgttccatttaggaaattcatccgctgcccctttcacatcacctgcgtgcagacgcttcaaaagcgtactgttcctgagagcgcctgcccccagattataggcaaagcttaccagggcatcaaactggttttgggttacgctgcactccagcaccttatttacagccttctcaaaggcccttaggtcctccctcaaatatgcctctgcctgtgcctgggtaatcttcatccccatggccacgccggccgtatgcccatatccaatggtggggacccctgccgcgcagcggtacgcctccagacggcagccctcaaactgtttaatcaggcagatacctgcatccgatatccttcgttctccctgggcatatcccgctttacgatctgcttctgaagcggttcctgcctttgtgaccggaggctgcactgcaccagccgtatattcgctgccctcgtacgctgccagcgcaggggtttttccttctgttttgccaggtgatgtatgttccggctccctgccgtctccattttccaccgatattcctcccgtactaatgggaatctccgcggattcttcttccggaaaatgcagtacgccgtttttgtccacctgtaccataaaccgtgtcccaagctttgccatctgcccatcccggttaaagtaatacggctttcctttgataagctgaaggcccttaaccattgcaaaatccatcccaaaataataccaattatctttataaagataccagttattccgcaccgcatggccggaaccgtcgaaccagaaccactggcctttgtcctgataccagtcattggccacataccgttccggttccagataaaaacggacccctccgtcttctttgaaccatcccgtgggatgggctgatggaactgctgattcacatacctgctctgaatagtcaatatccttaagtttcagcacactgacccagggtgtatcctgcgcccttgtctccaccgtaccgtaattgattcccttggcctcaatgcatgttccgtctccaatgtacaccccgatatgccctggcttccatagagcccagcctgccattgcttcattcaatgctcctatgggctgtacctcacgggcagtctccttataattggcgcttcccctcaatatgccggtgcaccaggtaatcaggccggaacaatccgtacagtgctttcccataaaactcctggccttagttatgtactggggtgtatagaccttggggttttccgctgccagctgtttcagcagcgcttccgtcaggacctgccccttcatgccgaacacatatggtgtgcccagctttcccttgcagaattcaatcaattccctgcttgtcttgctcataatttattttctcctctctgttcatgaaccggtatcttctgtctctatgccggtaaaatccgtatagtaaatattctgccgtacatccatcagcatgaaaccgtagaaatatccatccccggatacaggtactgtctctaacagcatatcatccggttcttctatataaaattcagttcccatatagtagctgtccgtgtagtacctgtcctccgtgatttggtctggattatggctcgtctctccgtgagagctcccggcagtatttccggtttcatctctgatttcatcttttgtttcatcgccggcttcatctttggtctcatctttggcctcatctttggccccatttttggtcccatctttgatcccatctttggcctcattttttgcctcatctttggcctcatctttggcctcatcaaccggttcctcctccacgtcctccatatgttcaaccagataaagcggagttacccgatccccctcctttaactcataaatctgctttgcggcctcggaggtctgccctgcaggtgtcacggaaagaacctgcccgtcttcatgctcctcgtcaaaccctatccgcatcgtgcacagctccccattatacagaaccggggccatatattccgtgtatgcatccagattcatggtttcaatcaggcaaagtacctgccccttcattcccatatagctgttctccggagccgcccgcagggtaccgtccacgccaatatccacatcactgtctgtgcagagaaggtagtagttcccgtcatcccccacaggacagaatacagccaaatacgctcctgtcacgtcggaaacatcctcgggggctatgctgatttccactgtaccgtccttatgcgcatttatgtccccccattccacgccgctttcccgggccagatacgccgcatatccatccgtcagctgcctgtaggcactgcagaatcctgtggtatcatacgtttcaagatcctcgctcagataggggttggaaccgcttggcaggtatatagtaagaccgcttggattcccgggatagcctttggcccactggtccgtcacaagcttccccatccgctccttcaatgtctgaaaggcgctttcatccggatatacgctctggcaggcatccaggaattccagtacatccaccagctccggagaacctcccgcctgtctgctgccaaatgccagcattttcattctgtcctttcccagctccctgtacagctcttcccgcagttcctggggtatcccgtccacatattggtgaaatacctcatgaaatgccggatattccttcatatccaaaaggctcatggcaacaggcgcagtacctgaggcatagtaggcatcataggcatccaccatagaccggcctactgcttctccccattccatatcagacggcagactgtctcccagagctgtcatccagctgtaatcatatccatcctgaggttccagctccggagatgcaatgacatagccggcccttccctccagacagtcagcaatctccacgcttcccataaggcaggcgtcaaacgccacaaagtcaaacgctttgtctgccataacagaatggtccagagcctctcttatctcctctaacgagagcccgtccccgtcaaaatgactgtcgcttccgtatccacccaccggacctcctccatgattccacagtatcaacccataatggttggccggataagactggacgccgtaattgacaaaatccgtcaatgtatccgcatcccccatgttcctgatttccatgggttccatggaggatatcccatcctctgtcagagaaaatctggcatagggtacaccatccatttcatccagctcccaccgggtggagccgcctgcctcaaccaccacatgaagagaggggaaattttcctcctgtcccgccgtcctcagggcatccatcatttccctgaggtccgctgtggctgctccataatccccttccaggtcgcttccgttcatgtaaaccatgattgtactgtccgccgcctctgcggcctctgtatactcctttacctgtatgccctgacgctcagagccgctcaccgtatagagagccgcacctgccagcagggcgctgagggccgccgcgattcgcggcgcagtgaccctctttcttttttcatccatctgccaatctccttttcattatctgttcaaaatcatttttctgcttcgtgttttaacgcctcgcatcttgcctgttcacagcctacagcctgctgtcatacctgcccttgcggctcctgttcctcattacgcgcacgttctcagaggtccgggccccaaattcctgcctggcctcgtccatatactggtgaatcaatccctcccgggaaagattaatgtaattcttgccgctgcggtccacaggaaagctgcggtacatggcctcctcggtcttattcagcacgcgctccatactcccctccgccgcggacagcgccttcttctgtttctgctcacctgttttctgcttttgaagctctgcatacaccagcatctgttttctctggctctccaccgcggacatgctcttctttacctcatcgtacagcagctttgcctggtcgtaattgcgaatgacatccttcagctcagacagctcctcatcccggaacacgccctccttttctttcagggtaatcttgcgctttaatccccccatggagccggacagcgccttcacgtccccggcctgttcccccgtactcaggataccgcccacacagtccagggcattcatatactcctggttcatctggtcaaagtcagacatgggttcgctaaactccctgatataggcttcctgcatggaacgcatcagccttgtggaagatttcatctgttccctggcacctgccaggcgtctgcactgctcttctatggtatacgtctcatggctgtaccgcctgaaattgctgcggaaagccccgtcctcaatgtggtccaaatcattcttcatttgcccgttcatattacctgataccgcgcctgccgcatcggatttcagggcagagtggcccatctttgtctcgtaccggtaggtctttcccagggcgacaaactcaatggatgccctgaattcctgttcgctcatattagccttgccgtacagctccagccggttgatatagaagaatgacaatgccccctgtatcacggcattgaccgctttcatgacaccttctcccacttttccagccaactgcactgcggccttggccacctgaagggcggctgtggccactccgattgccacatatatgccggccttggccacctcataggctcctatctcaattccctttgcaatggccacaaatgccttcttccaccacttggcattcctgatggagcgtttgcagtcttcaattttacggttcagggaatcaatctggccatacagttcattcacatgggcctgggccctgtctatctccctggtagcattcttaatcttatccctgagccggtcaatggctctgtttatgctctcctgcaccgccttcagtttttccgccagcttggacgtatcaatcaccagacggaattcaaacccgccccggttaaaatcctggtaattcaccttcagatgaatgcttacatcaaaaatcgccagccagttaaaccgcacatcaatggatataagccccttacagaagataatcctggtttcaaaatacaggatggacagcagttcaatccgtccgtccagatagaaggtcacatccttcttgcctgcggacaggaagaatacaatccctctctgctccttacccataaactgcctcagcacactgtccgccggcacgggaagggcttctccggactcctgccctgcttgggagggacctaatttcaggaatcccagattaacctccggtatgcgtccatacgccagcaccccatccccctcccggaaggaaaacagaacctcgaaccggaccttgaaaatctcaatgactccgcatacaaagattccccgctccaccgtgtaactgcccagcctggtatttacatccgcatagtagaactgagccgtaagctttataccgcctgaaccgtctatgtaataatgccgcatccgccgctggtccaccaggtccactccatccccaaagggagacgcctttacctgatccctttccaataccaggctgttatcatggattctctggttaaatgcctctgccagccgggctccgtccgcacgcttaaccatttcccggtcaaatgcctgcatgtcctggaaaggaagtcccaatatacgtataaaatcaatgctgtcaagaccgtcaaaggaacatcccagcaaattcctcaccaaaatgggaatggacaggtcactgactgctgcggacagcaaatccagctttgggaccgaccctgccacagtaagcattacagccccaaacaagtggatttcccttatataaagattggcaaacatggcaaaggaagggccccggtcaaaccctacggccagacaggtatcccctatggaaaagggaccagccagaggaattggttccctgacctctccaaaggcctccaccataaagcgggttctggatatgccgcagttaacatgaaactccatatccggcacaaaagcaaaccgaaaggagccctgaagggccagggacaaggccctgcttcttagctcaactgccagacacatattcctgctctccatgaaactatttttagatgcaggtatttccgccatgcacagaaatccatcttcacccgcccccaggaaaagctgcgcctccttaaggccgaacaattccctgagcgctttctcaaacacgctgtctccattcagttttaaatgggagtaggtaagaaggctgcacctgtcaatccgggccggaaaggcctctgctcccggtgcctcagccatcaggtcccggggactcagcccctttcccacacgtccgaagaaataaaactcctccatcccaaaaaagtccgctgccttttttactgcatccataagggatgatacctgggcatttcccccaatactgtctgctgaaaatgaaaaaagaatggctgcgcttcccctgcctgctgctgccttgaaatacagccctggttctccataacccagggctgtgattccatgaatgcaggaaagagtggcgcgttgactggaagcatgtaccaggccggaggcgtatgccttgaatttagaagccatttcactgttcacagcctccaataatcctgcgggccccctctggtccatctgcagttccccgtaaaatgacatttcgttcttatcataccagacagccagcttggccggacagcccttgacggctccctccacggctatactgcacgacatctgcctctggttcattcctgccgctcctttcctgcaatcgttccatgatgctttgtccattacttaatgtaatgctttaaatgctgctttgaatgctgctttgaatgctgctttatctgcagcttcccaaactgtgtttcctgcgctacttagcggcctgactcttgtccggcagtgcggccacgcccagatattcgtccacagtaatcagggccatcttgtccactaccttctttctgtccgtattccagacagaaatggaaaggttggtcacatccacaatgggcttaatggtttccggtaccagaccttctgttaccacctgcagctgaaacgcatactccaggacagagttctctccctttttacagatgtacagatacgccatctgcagcctgattacaatatcttccagtttcatggatgtggagccgccgccctccttggcggcctcggtcatggctgtctcaagctgggtcgtatccacggcagtatcactgccagacacacccttggccatcttcttgatatcgtcaatcagatcctttaccgaaatcccactgtccggcgtctgttctgacggaatcaaaagaactgcgtatcctccctcatttttttcatacatggcatgaagctgggtcccaatcagggaaaagtcaatacctattgaagcttttaatgtgttgttttccattctgctgctctccttttcttagattattttgtattctatctatctcaatgcagccctccggatgactgcaaagccatcataccgctgaaatggcgcccactacgccttgacggcatcctttgaatgattaccggcatgaatggctgttaattgctgaaaccatatcatgtttctgatgtaatatcctggcactgctctaaccagggtgtgattttatcaattcgcaccatcctcttcggcaggaaaaatggcgttctgcatgtaatgacctgctccacctcatccattgttttctgcaatttgcgtgtccattttcccaattcttcccaggtgtctctgtctcctccctctgcatacaatatacattctttctctgtaagctccattccggttaccgtatcatgggttctccagaccagccggctgtatgaatctgaaattatctgttcctccccaccaagagtactgttcctgtcacggcacagatccatctcatccgccaggcgtatgatgcccgcgatataaggaaggcagacagactcggtccctatttgaaatgctgcgggaaaggcattttcatcccacaaatccgtttttctgtgtcctctcactgcctgcataacaggaaatacatactctttccggatttcaaaaatatcactgtatttttccacaagcagggcgctgaattcctgatgatattcccggatcaactctgcttctctgcccttggcaggatatagttccccgcacagcacaggggccagtccctcaaaatcagcttttgaaatccccatacccaaatcatggaacagaatccccgtcaaaagcacatacagctcgcttccattcagctgcagcagacaatctcccaccagctgtccggccagattcataatattcaggcaatgaaggctgctgtggtccgtatactggggaaatacgttcctgtaccggtccagcatcatacaggctccggtggaagcttccagatagtttctgtgaaggctgggagaacactgcttcaggcgtttctgcaaagcgaactcccatttttctgtagcggtatggtttatgtacgtatcagtatgttttatatcttgttccttgtgattcatgtatatatcactccttctgctgttcataaaatggggttatatgatggccgctgtacgttcctgatcttttcttataatctctgactgtttttttcttataatgtctgtctgtagtctcttgccgtagcctctttgccgcagtctcttaccatcatctcttgccgcagcctcttgccatcgtctcttgccgcagcctcttaccatcgtctcttgccgtagtcccttaccatcgtctcttaccgtagcctcttaccatcgtctcttaccataatctcttaccatcgtctcttaccataatctcttaacatcgtctcttgccataatctcttaccataattccgtactacattctcctgctgaaatcccttctataaatatccgccatatatgtccacgccgtattttccctgtcatccattaggccttctccttccgccctgttcctgtctgtatgacgaatggctgctctcctccttctgccacatctggttctccttaagagacaaatcttccagtgcgtttaaaaacatctggtctctctgtttccggtctctataattccctacgcccaacatgtagaaagaagtttcgcttttcaagcgctccgcattggaacggtagcgaatcatattttcatgccatccgaaaatgccggataaacctccaacaatccccgacaaaccggataatgccgtgatacacaactgccgcatcccgtcggaaagcatgttgcccggaatggaattcagaagaagtatgagagtcggcataacaattcccatacaggcagacatataatagaaacactggcaccggttcgccatgaccatgtaccactccagcctgttaatcagccgttccctgatatacgggtctttgacatgctcctcaatactttttaaaaatgttctgtcattttccatattgtaactgtccaattctaataatctcatttcactctaaggacctccttcggattatactcatgctgccatgatacacctagttcaggctaaaccggttattaacggcgcggttgaacgggagggcggcatggttgggtggcttggttcgccggcagtgttgggcagcttggtttgccggcagcgtgggccagcttagttcgccggcagcgtgggccagcttagttcgccagcagcgtggggaagtttagttcgctggcaacgtgggccagcttagttcgacggcagcgttcgccagcttagttcgacggcaccgttcgccagcttagtttgctggcagcgtgggtcagcttaattcgccggtaccatgggacagcttagttctccggcagcatgggccagcttagctctccggcaacgtgggacagcctagttcgacggcaccgttcgccagcactgccaagcggcgccggcgcacgaaaaaggacgtcaagccacagaccattccatggcttaacgtcctttcacccaatcagtctctgaaaccccagtcagaccggattacattcctgcaaactgattctttaccttcatgattttctgctgttccgcctgctccatctgataccatcccttagcggacatctgcttatagatgtcatcctgcatacacaggctgtcattcagtgcctggttaaaggtctgatgcacattagctgtggaagactcgatggttccgtggacatacaggtcacatacacccttctcggtcaggagaaggttctccataatacacttgtcatccattctctgcttcctccttatacgagattataaaaactgtcgaaaatctgcttgtgcttctgttccatctgctgtgcctgatttttaagagcaggatcctgcagattctggatggcttcctggcactgattcattaaaaactgctcatggcctaatgcatcctcaatataatttaattcctttggactcataagatatcacctccatgattagtataccgcatgcctttccaggatatgcataaacctgaatgtatctacaattgattaacttatcaggtggaatacaaatgggctcaatactaaaagtccaatacaaacagccccaatattattatcaaataaaacttgtaatttcaccctaaaatacagtacaatagtaatagtaacatgtataccggcagtcaattttccggaaccacaaggagggatattcaatggcaaaaaaatcactcatcattgcagccttggcagctttcctctccatgggcactctgttctccgcctatggacaggaaaaagcaatcacatccatacccttgacattttcctgggacacggccccaaagggcggcgaactggtaggcaatgtatatgcagtatccagcaacggtgaattcaaggtggaaggagctgtgtacgacaaaaaggatgaccagtgggactatggcgagaggcctatcgtggaagtggagctttctgcaaaggacggatactatttttccagcacaaaacgcagcatcttttcactgaccggctgcggagcccagtttaaaaccgctgaaaaggacagcgatggaagtgctttaattcttcaggtgtatctgcctgccatagacggcaatcttcccgctaccacgtctgtcagctggaacctgaccaccgctgtgtgggataaggtaaacggagccaaaaactatgaagtgcgtctgtaccgggataaaatactggtgaccacccaaaagactaccgaatccacctatgatttcagctcctacatcaatgtggagggaaattacaccttcacagtacgggcattgggcatctacagctcccaggccggaccatggacagataattccgagcccctgaccatccgcaccgaagacacctggtttatcaccaacggaacatgggataaaacctcatcgggttggcgctatgtataccctaacaatgtctatcctgtaaacagctggcgctgcatcagcgacaactggtattatttggggaataatgggtatatggaatctgattgttatgtaaaatcatctgaccaggatttgtattactggctgggaagcgacggaatctggaatactgagaaggatacggctgcgccggagtccggggcgcgggtagtgaaatagtaactatataaaaagctgtcatatcaatttaaaaagtccagattgatatggcagctttgattatatagatatttcctaacaaatgcatattgtaaatcagccttcaagttccgaaaacctgatttccaaataacgaattatatattcttttgccttttgtgtcttaatgaacctcatccagcccggttcagcactatatttctgattatctacatctgattggcttatgattgtcactgtgtccccatgtttaagaatggtgtctaaaggtctcatttcgttattaataatggcttgttttgcacataggccaatatctttatggatataaaaagcaaagtccagggctgtcaatttttcatcgaactcatggggccttttttctttgtcataaactataattcctgattttcgcttaccatgccacttttcttctgagaactcctgtattttagagctataaaaataacgtttacatatttcagttgtacagatgaatatacgataccgtactccccactttccctgtagtatgaaatgagaaagatattgttctgtctcatcttcatatccaagcagcaaataccccttttttacaaggcagtccaaataatacttcacccattcttccgatttccttctcatatatagaggctcggattcactatttaaaagataaacattatataatgggatttcatatatgacaggattattatagtcttctgcagaaacagtataacctttattgcataactggttataaaattccgactttctaagcttattgataaactttaactcaaaaatattgccgtcaatatcttccattaagctcttggtggattctgaatttacagaatacaatttttgtaaaagaatatctgttttctgaaaataatctttacaagtaacacgaaattcaacttccctgaactccttctcaaaataccgtatatgcaatcttctggcccataatacaagatactttctggttatctccaactcgccagacagcaccttgcggcttcgcactcgaagtaaatccaaatttttggcaaacaaaagaattagtgccagataatgtacatcctccatatcgttcaaaagcttttccattactactgaagtggctatagtatcctctaaatcatgataatactgtaacacctgcataagttttattttatgttcttccggtatagtcttcgggatatcctgaattaacacatcctgctgctgatcatgcagcaatgctgccaatagcatatacgcaggcagacgaatttctgacattttcaatgccattctgcagtaatgtccctttgtacgctgaaacatcagaccttcagccgtcctgcgtacattccatttatccgctgtctcacacagatatccattataaacaggatatacatatttcatccgctgcttcattcgctcaaataataactctgccctcgacattgattttctcccccaaacctgtttatcagcgattatcctttatgaatttataccaatcatcatttcgttcaacctcaaccttattagtcctaaacagatttgcctcaatatatctcttgatgtaattctccataaggctttgaatcagtctgcgctttgtctcttcttcaaaagcggtgataggcctgtcattacagtataaaagcttgaaaaattctgtcaactctctggattcacgaatcaactccggattaatctcctcgaatataagcttttcgccaattgccgccggattaacttttaaataaaaacgggataatcctatattttggatacatggtgaagaatatctgcctttagaaacagaattaatagtgccgataccacctatatacttcggactctccgagttaggaatcctcaatattataaacgctttatctttctctccgctattcagattaataaacagattatcccttgaaaatgcaagatctccataatatacactggtatttcttctgttcctatatgcttccttgagtctctgttcacattccgcatcatttatttcaaatatcctgctgcattcatcgtgaaaaacttttgtcttactatccgccatattaaagcagcccatcacgcccaacgtatcttttcttcctctttttttgtaaatgctcaacactccaaaatgcactgcctcaatatcacttttttcgtgctcatcaccatggctgctggtatcaaataaatatataaaataggcccccacatatttattcagattcttacctgtaccttctgcttttgctccctgatttcccccctttgttatctcaatatcagtggatgttatgaattcctccatagaaaaaccatattgttctctcagtgttagaaggaattcgaaagatggcaggctcatcccggtttcataattggaaatagaagacatggatttcccatatttttttccgaacgcttcctgactcaatccttccacttcccggattttctttatattcgtcttcaacacccttctggcttctatcatttctacagagaattcaccaccatattccttatccatctttcccctcctccaaaatttcatataaagcatactaaataattgattaatatttgctttgatttatttaaatcctgattattttattaaaaattaaactacataaaatctttataatatctttatataatacgcaaatagaaacatctttcacaatatgatactatttaaccgcagacctataataagtatagcaccgccgcatattatattttaagacagttgaaatatgatacttattatggagaaactttataaccaataattgacaccggaaaaccagccagacgaaaggaggatcttatggatacaagcaaatctaacaccatcatcagtaaacgggttttatctgtcttgcctctggccagcatcctggtcattgcatttttattgactgaattccatccctttacatctgattttaagagcttttttacgttctttctttcaggctggtttttgtttacactctatctttcagtaaagggaaaacatctccacgaacgttacatgatatttattctttcacttatagtcatcataaatggcttataccgaagagaaacttttgaagcctattttcaaatccccatagaatatggagcttgtatcattatagttttttaccttttgcggattagctttccttatattaagaagttatctttatggttcctttcacatacccaggagccccctgatactgatacaaacactccaaacaacggtgcttcaaagatgagatatgccaggcaccgatttgttcaccacacaaaatcagccgctgaagctgattcccaggcgtcttcaaccaacgccaaagttgtctgtcccaccacacaatatcacaaggggatttcattgggacagtcgctcttatacatagcgttaaccgtcataccctttttatttacttacaatatggtaacccgattatctcaaacaaccaattacagaatcgccaacacggaaacactctttcatgatgttaattcaattatcatagtgtttctcattggtatactgtccatggttgtcgtattcacccttttgttctgctactataaactgataaaaataatggtcactacaatacaaggaaatgaaaacccttccgcctatgtactaaccattgccgccctatcagcatttttagctaagaccggtgtattaagccaagatactgtactaaatctctttgcacagggcgatattttttcgctgccactgttaatattgattctttatccggtttgtcttttaagcgtacatgctctcattaatctggcaaagaaccacaatgtaacatcctggattcttgaccgcgctatacagctggcaaagaaggcagcgagtataggaaacaatattttagactcatctattgatctaattgcatttgcaactgccggttttttatcaagcgctatggaattaattgatgaacaggaaggagacgaggaagaatgaaggtattaacaagtatacgaaagcttttggtgacctgttcccttgctcttgccatggtatccttttatgcaaccgcccagggactccatgaatatgtatttactcaaatgtggcaagcacttctagtatccgcagccatacagactgcactatttatattaaacctgaagctaatatattttttcacattaaaccccagaatcgtcctgattctatgggcaacaatgctggtatcgtcctcgctgttcagctttgtatttatttcaaatgaaatatataacacaagtctctactacagtgacgctgaacgtatcatggatgagttcaccatcaaaaaatgctatcagtaccagaactacctggataattacctgatctacacaaaagaggccatggatgcatactgcagcgttccatttgtcagccattcttcagaaagtaatacagaaatcaccaaaatactcgatgattgcaaaacagatatcagcagtttcactttttcatcaaattgcgcagctttcaaccgctctctgctgaaaaatctggacagcattaagagttctctgccttcctcgtatacagagcagcaggccaacgatgccctgactgcactggaaggcgaaaagaataacgcggagactttaaaaaacaatatgttatcgaatataagaagtaaggaagcagtctggaacaatataaaccttcgtcttagccagtataggaactttaatgaccaggcttttattgatttgcagaatgataataataaacgtgacacagaaatcaactctatgaaagcggaggcaacacagttagattcagtcatatctgcgctgcaaacctgcatcaacaaagtcacctcccataaaatgaataacacagaaaacacaatggaatcctaccgccatgatcttatggtggaaattaataaggacgcccccgacggagacatccttgacacaatcaccagcgatatgtttgccctgttattaaaagaaggctttaccagcagcagttatgaaatgacaaattacttcagttttaaaaactccctttctgtgagaaaagaaatacttgagtgtcaggataaaactgacgcaatcatccatatgctggataataagagacaggataaaaatgcttttatgttcacctcaaaagcagatgaaaacacggagaagcaaattgaaagctggaaacaactctggtatagtcagactaatgaattgcgtgaacttgtaaaatccctcccgctgcctcaggacttaatcatctacagttcagatgcagagaacggtactgtcaccctcaatccgggcataaacctgccggaaccggaccgcacggaagagattgatgacatttctgctcttgagcggagatatcttgccaaccttaatcctctggaaaaggcattaaacctgcttcacaccaaatacaataccatggctttattttccgcagctgccgctgcagttctggatatatcaagcgccttaatgggagcctttgtatataccctggaacgcactttcaaaaacaggaaaacggccccggcaactcctgcggtacttgcttccacggaatgaacagagttgtttatatctattagcctgggactgtgctgaatatatgattcagagatatcctaaaacatgaatttttaatgagcccgcctgatggcgggcttattgcctgtgtttatagggggactgtttcgcacggtttaattagtgcatttacaagcacatggcacacattaaggactaaaaccagcctgttcccaaaaaaccatacagatataattctaccacgcccacttataatctaccgtatcatcagaatcaccaatccgtcctatatgaacttcaatcaaatttacatcatctagtgcatatattgcatgcttttgccctgctgtcagataaatcacatcccctctattcactattctaatacaaccatccacattgactttcccttccccattcactatagtccatatttcatttctacttccgtgagaatgatattttaaatgtttaccacttttaataaaaatatgccttgtcatggaacaagtcatatccgaatactccacataatctgtgattctgtaatccccccactcagttactacatgcatgggacgaccagaaagtttctctacatatggctttaaataagaactagaccgtttatcagaaactaatatgccatccggactagctgagactatcatatttttagcgcctagaacaatcatcgggacttttgtttcattaataatcatagtcctctccgtcccttctcccgcccaggcacttcctatcgtaatgtcccctatctcttccgagagtacatcccagctccccaaatctttccagctcccgttgtatgttaccatagcaacagactccgccttttcaaccacctcataatcaaagctaatttttgtcaatttcctataatcactgcgaaaagtatcaaaactctcaaacacaaatttacgatttataatatcaagaagatatcccatcttaaaagcaaagactccaccattccatttagctccctcgttcaaaagcattctagctttttccaaagatggtttttcaataaattgcttgactggccaagctctccccttctctggcattttaatatcggcagccggaacaatataaccatacttctccgatggatacaaaggagatatccccataagcactatatcggcaactccgtcttttaccgctctttccatttgtatcattgtatggaaatatccaatttctacatacgggtctaccggtaataccagaattacctcatcaggtccaatgtgcttctccatggctaaatacactacggacaacgcaattgcagggaatgtatcacggcgttccggttccacaacaatatccacattctcccctaattggctgcgaatagattcaatctgagaagcactagttgcaataatgatatgtgcatctaaattagcctcacatatctggcggtgcactctctgtaccatagattcatactgtccatcttgatttcttaaaagtttaataaactgtttagctcttaaattattggaaaggggccacagccgcattcctgctcccccagatagtaatattatattcatcttttttatttacctaattgtaataaggaattaaaatacaggctcccccgcattaagcaacaattacaccaacaacttccacccctacatttctggcaatctccagttcctgtttaatacctgaatattttgaaattgctcgttcttccactaatattattgcctcacactctgccattcttctgcgtgcggatgcatttgcaatcatatctctttccgacacgaacctgacctctggtaatgcagaacatagctgtgcacaaactttatctatcagctcctgtgatgcctgaccagtaataaataatacattcttactagccgcataattatttatatttgtaatgatcatttccaaaaccgctttgtcggaccatgatttatcatccccagccaatctatgaagccagttatcgacaaaaccaaatgcgcgctttttcggcgtttttgagaatacgccaagacttttaagtctaaatctgttgataatctccttatcagaaacaactctgtcatttaatacatacattacacatacaaaaaaaactgccgcaaatcctcctcccagaaatcctaaaactgcatatttcaacatggctttttcggaatttcctgcagtatgctcatctaccggaggctggatttcctgtaaactctttgaaaaatccgcaaggcttttctgaagggaaccgacattttccctcacactctgctgcctaataaggagttctgtatctacctgttcacctgttgcctctctcaaaacagttaatttgtgatttacaattgttgtgttaaacgtgtcattaagtaatttcatctcatccagtacagcactaagcagttcctctgtcttttgacggtcggctccaactatacagatttgcagaactccttttattgtttcatcatccttagtgcccaaaacaatttgtcctcttcctacattgtcatctgagtcaattcctccatcaacatttatcaattcctttatgtaccgctgctctgtcccaagtttttctgccaccttctcaatatagtctccattgctaagagcatacatatatgattttataacattgtcaatgtctctgctttcggctgccttgctctctattaatatttctgcagtagagacgaattcattataagggttaatctgcataataggagcctcagctatatactcattctgttccattatgctgctttccaaattctcaacagttctttcaagggctctcttttctttttcatactgtataagtttttcctcatatccttcttccaaaacattttgcacctcattacctttcagacctttatatcctcccagtactactgctccaatagcagcaaccaacaccaatattctccatctatataatatagaaaaaaataaatccttcaaatcaatctcggcctcataatcctctgtatacatttctttttctcctttctcctttatctggaacctttaccagtaaaaacaactaaaactgtaagcaacaatatctttatatcctttaaaatactccaatcatcaatatactgcatatctaattgaaccacttcatcgaaattcttgatatcactccgtccgctaatctgccaaagccctgtaagtcctggtgtcatactcaatctgcatttatgcttagcctcataacgctcaaattcatccacagttggcggcctggttcccacaagactcatatctccttttaagacattccaaaactgtggcaactcatcgatacttgttttgcgtataaacctaccaaccttggtaattctaggatcattctccatcttaaacatcaagccctgtacttcattctgcgctatcaaatctttttttcgctgctccgcatcttgatacatggaacggaatttgtaaaaagtgaaccgccggccattcttcccgatacgggtctgcccgaagaatataggacccggagattcaagcttaatagcaggagcaacgaaaaccgttgcaattgccaatattaccatacccaccaagcttcccacaatatccagagccctcttcattatcatacccctggtggaaatgatattccgtgcaaaggtaaccacagcgtatttccccacacggtttaacaccttatttccatggtttaagatgtcaaatacatctatattcatgtccacgattatgcccatctgttccatttctgaaacccaattttccaagacactatgattcgcactatctgcgtaagctataaacacttcatcaatgtcattgtgaattacatattccatcaatgtagtctcggatgcaactacaggatagcccttaatagaattccccaaatcatctttatccagaatcgcaatgcctataagaatccggttccactccctatactccacaagattttcaattacttcctccactcgctgcgaactggtgaccagaagtaaacggctgctatacttgctatttttgtaaacccggaacatatattgcttaaaacaaagccgtaatacataggtaagaattgtgttaaatacaataaaataaccaaatactagtctggacaaaatatctgtcatatgcgtcacatacagcaatacaatccataggatagcaaaaacagattgctgacgtatcacgctgaccagttcctcgaaaaaaccccttcgaaaaaaatgatgattaaaatctataaatacattaatcagcatataaagaatacacataaaaatcacatgccagatttggtctccgtgtctatcaataccatataaccgttcaaatctaagccaaaatgctgccgcaccgctgcaaaagatacaaagaatatccaatatccatagcaacatattttcaatactttttcttttttggtacattattacacactctccaataaaataaatgacacagaatatgtaaaactgtgtatttgaaataatcaaagtttgatgcaaagaatcgttttttatcaaatacgaaatgtcaacgtcaacattatatcacatactgtaaaaaaaggccttactattcctttaaaatttatttttttatataatatatctactaaatcaaaggaggatattatatggaattccaatatgaacaccaaaaacagcttatcaatcagtttcttttaaccatttctactgaacgtaacctatctaaaaaaactgtatgcgcctatcggtatgatctaatgagtttagtcaagtggttatattctcagggacaacacgaaattagctcaaggacaattctggagtatttctcttccctccaaaacatttcaaatttaaaacctcgttctatatacagaaaatatgtttcaattaggcagttctgcgaatttcttttacaagaaggtcatgcaaaagaaatcctcttccacttttcaacaaggcgtttccagcttccaaagaatctcccccgcacccttagcaaacaggagctcacaaatcttatacattctacagaacaggagtataccgttttaactagcccatatagaaggataatatgtctacgagatatgagtattattgaaatgctcttctgtcttggcctgcgcattagtgaagtttccaatctcctgttggaagactttgattatcattctcaaagtatcttaatccgcggcaaacggaataaggaacgtcttctttatatcccatcctcaatcgttctaaataagctgcttgattggatatccgctcgaaattttttaaatccagctaccagccatatttttgttaataaatatggcaagcaactgtccatatatggaatagaaaatatattcagcaaatataaagcaatttcgcgtatcaatcctaacgctactccacattatctacgtcactcttttgccagtcatttgctaaataatggcgctaatcttagagatgtgcaggaactgctgggacatgccagtattgcaacgacacagatttatactgaagtaacaattgaaagaaaaaagattgtcatgatgaagtataacgaaagaaactttcttatgcaatagggtgtatttggttatttaagcgaattgttgttaagccatctgctaattagatttattggcagatggctttttcgcagtaggtccaaataatagcaattatttgttggtaatataactttttattggtttaggtgtaagaagaaatagcagaaactatcaagaaatattatgaaaaacttgattataacaaaaacactgaaacaaaagtttacacgatttgaagatatattaattttctcaagacggcacgtattccacataagtagtaaaggaatttacgcttcctatggtggatttgaagcttttgggctatttattaaattaaaaggaaatatctccctttatattagcattaaaagcaaaattatccactttttttgttgatggtgccatgacggtagaatagaataattggtttaatgcatagcactatttcaacattatttctgtgcataaaaacaacaacacagcctattcaaaaatgagtgttgaatgggctatgtgtgttagtttaaaccagatgaaaaatgagatggaattgaggaaaatagatggtacagatgcaacatgtatttatagtgggggccaaatctttggctgcatatggtggatatgaaacgtttgtgtataaactgacggaatatcaccaaaacaatgcgaagattaaataccatgtagcttgtaaagcaaacggtgaaggttgtatggatgagagtaaaatggttggtgtaataaaaataaatgaccgagaatttgaattccaaaacgctcactgttttaaaattcgtgtgccaaatataggggctgcggcagcgatttactatgatgtaatgtcactgaaaaaatgctgtgattacatagagaaaaatcatattgagcacccaattgtctatatccttgcttgtagaattggcccttttatggggtatttttataggaagatacacaaactcggtggaaggatttttttaaatcctgacggacatgagtggatgcgggcaaaatggagtgcgccaatccgcaggtattggaaaatttctgagcagatgatggtcaaacactgtgaccttgtaatctgtgattctatgaatatagaaaaatatattcatgaagaatatgatggaaaaggggcaatggggagctctccccaaacaacctttattgcttacggcgctgaaacaagaaaaagcactcttgctgaggatgcccccgaattaagctgttggtacaatgataagggcatttcggcatctggttttttttgcataattgctagatgcataccagaaaacaattacgaaaccatgattcgagaattcatgaaaagcaacagccaaaaagaccttgtgatcattacaaatgagaatgataaatatttaaacggactggagaagaaactgcactacaaggcggattcaaggattaagtttgttggaacggtttatgatcaggaactgctgaagaagattcgcgaaaatgcttatggatattttcatggtcatgaggttggtggtacaaatccaagtctgcttgaagcattaggaagcaccaatttgaatctacttttggatgttaggtttaacagggaagtggcagaggacagtgcgctgtattggagtaaggtagatggcgatttatccagactgattgaacaggccgatggcatgaacgataatgagataaaagagtttggcatgaaagcaaagaaaagagtcatggaagcatacagttgggaatacatcgccaacagatatgaggaagtgtttgtcaaatcatagtcttactcgaacaagatagaataataatctattatttatggaaacgaaagaattagcacgtaatcgtgtgatgagatagagaaaatgttaaatggattaaaaaaggataagtatgaaattatatcttttgatatttttgacacattagtaaatagaatttttctctccagtgaagatgtttttgagatagttaggagattttacattaagcgttatggtggagagttggatgattttgtttcacatagaatgaatacagaacatagcctttggaaaagaacagaggcaggtgtattcacattagataatatttactgtgaaatgaagaagtattacccaaatgatacctgtgaaaaactcaaagaaatcgagcttgaaattgaagggaaagtcattcttataaatcagaataatattgctatttacaatgagattgtggatagaaagaagatactaatttcagatatgtaccttgaacgaaaatatcttgagaaaatattgtcacagcttgggattaaaaattatgctgcgttatatatttctggtgaacaaaaagcggccaaatataatggcaaaattttcaaaattatcggggataacgttggcggaaaaaatgaaattctacactgtggagacagtttccggggtgattttatcatgccacgtttatcaggatggtcttcgtgctggataaaaaaatacagaaatccttacatcaggaagtataagaaatattcaatgagcgatagtctgctagtaggtctgttaaataacaggttcttatataatgagtattactacacaaatataggctatgccatccttggccctttattgtactgttatgtcaggtggatagaaactcaactgagagaaaattgtataggaaaggtggtatttttagctagagacgggtggtgtgtaaaaaaagcatttgattatttgttcgcagatacatatgagacggaatatatgtatgtatcccgcaaaagtgcggttaatgctgtttcaaatgaggcagttgatgtcaattctttactgcataagtataaattccggaatagagagacattagaatcggtactgctaaaacttggtgtggatgatataaaagatgttcagaagattgagatatctcgcaataagctttacatgggagcatacaaccatttgattgaaccatattttaaagaaatacaggaatccaatgagacgcaaagacagttcctggtggaatatgtaggcaatttatttgatcgtgacgaagttgctgtagtggatgtgggttggcatggaacgattcaggattgtataaaagaaatatgtaaggataatgtatgtgtaaggggactgtatttgggacttgaggacaataaacaagaatataaacatgcttttttaaatgatagtatttttgatgcaaatatgattccatttatccgtggaatagtagaaacattttttaccgcaccacatccgtctaccattaaatatgttaagagtaacgatatcataaaaccagtatttagtaataatgatgaaaaactgaatatgacgattcaacatattcatgatggtgcgatgcaatttttgaaggaatatgtaagttatgccgcaaagttagacattgaagacgatattaatgtaggcaatatccaaagaatgtttatagagttttgtttgaacccttcaaagaaagatatcggcttcattaaagatttaaaattcaatgatgttaccaatagtatgttgttagattaccaaaaaggcaagattaaacacaattttagtacatttttagaaagtgattggaaagctgctcatgcaaaaatgctcttcaaacttccagtctcatacggaagaatatttgtgaaaataaatagaatacggaaaatggtggtgaaaccgaaatgggtgatttaatctcagttattgtgccggtatataatgttgaggcatatctggaaaaatgcttggagagtatctgtaagcagacatatcgcaatctggatataatattagtcgatgatggctcatcagataaaagttcagacatctgtgatttatataaaaaaagagataaacgaatcaatgttatacataaaaggaatggaggattgtcagatgcgaggaattgtggcatagcctccgcaaacggagattatttgatgttcattgacagcgatgattatattgaacaaaatatgattgagatattgtattacaatttgacagaaatggatgcggatatttctgtatgcggatatttcatggtttatgaaaacagagtaataaaaatatgtgatggaaaaaatcgaacagtctatttatctccacaggccctgaaggttcttctaaaaaaagaaaatattggtgttgtagcgtggaataaactatataagagaactctatttaacgatgtaaggtacccaatagggcagcaatttgaagacattaacactacatataagttgattgctgcttcaaacaaaatagtatatgatccacagcccatgtattactatattcaaaggacatcctccataaacggaaaaaatttcaaggcaaaaagatttaacaatacgctatatgatatggaaaaggctacagatgaactgttaggctatgtagaaaataatcatttggaagcattgaaaaacatttcaataggatgtctagatttttatttacggattattaaccaagagatcctgttcaacattgtaaataaggacttgattacgaaagccaaaaaaatagtcaataggaacacgtatttcatgctaaatacaagtgacataggatggaaaaagaagcttcaatttgtgatttttaagatgaatttcaatctgtataaaatattcataaaaatggcaagggataactaattatgatacctaaaaggattcattattgctggtttggtggaaatgagcttggagaaatagaacaaaagtgtatacaaagctggagaaaatatttgcctggatgggaaataattgagtggaacgaaaataattatgacataaacaaagctccgtatacgaaagaagcttatacgcaaaaaaaatgggcatttgtaagtgatgtggtgagacttgaaattctatataagcacggaggattgtattttgatactgacgtcgaattaattaagccgattgatgatattattgaaaaaggggatttcatggggattgaatcctatgataatggaaagatatttgttaaccctggcttaattatgggcatggaaccagggaatccggtggttaaggatatactggaaacatataaggataaccatttttttagaggagaacacaattcctcaaaatgcacaatagtggaaagaacgactaagattttaaaagacaaatatagaatgaagaatgaaaattgcttacaaaagttaaaagatataaatatatatccatgtttttacttttgccctatgaattaccaaacgggagagatgaatattacagaagatacgcacagtattcactggtattcatcttcctggctcacagaaaagcagaaaaaacgtatggaagtaacaagacgtatcaataattcgattccatcatttctcgcaaaagctataagctttgtgtatttgaaatgtggggcagtgaaggatatatttgtgaggagcggaatcagaggcatattaaagaggatattccatattacatgaagaaaatctttttgattaaaggtgaggaggcacagaaatgagaattaacatcaaagaaaatttattttatgttccatggactattctcatcgcaaataccattctcgcacaatcatatttgtcacattattcatatagatgttttacaatagtgggaatactattactgatatggcgtattattagtcaaaaaacttacaaacaaagcgaattcatgtgtttcctggtcctgcttcttgctacagcgataactgcttatgtgagtaaagataatagactgttatggtgtactatagctataggagcaatggaaaaaattaatattcaaaaaataataaaaataacttgttatacaatggctgcaatgattgcagttattgcattttcgtgcatcctattgtatggcaatgtaggtaccagtttaaaaggtggcctagcgttagggttaggacatcccaatatattacatggatatttttctttgataatagtaatgctggtgtacttgaattggaataaattgaggaaaagtcatatcattttattagaactgattaatctaatgttatatttaattactatcagcagaacgggaatgggaatattatcaattattttgttaatgatccttatttacaaaatatgcccaacatcatttatcttgaaattctataaaatagcggccctgattggaataggcatttttacaatattaccgattctctattattacaatccggagaatttcatactgcaaagcattgattcggttatgacgggaagattgtggcaaggtgcatggtattataatatttctaaaatcaagttatttggaaattattatgaagagctatatgttgccaatccatttgccttgttagacatgggtttttttaggattattattgaatatggaataatagcatatctgatatttgtgacgggttactataaattactgacatatactatgaaaacaaatgtaagtatgttctttttgataatgttaatgattctattttcttatacggagtctttggggacttatgtgttttttaatgttactttgcttggcttttcaactgttctgttcaaggccaacagaaacattctattgttaggaagaagatgaaaatatgaaagatattacaattttcacaccaacatataatagaagcagttatttaagacggctatatgattctatttgtctacaagcccatcttgatagcattgaatgggtagtaattgatgatgaatcgacagatgacacggctgatacaatgcagaagatttttgcagataataaagaaaggtttcctatcagatttttgaaacagaaacatggaggaaaacatagggcgataaataaagcggtatctatagcagaaggcgattatttttttattgttgatagcgatgattacttatgcaagggggcaatcaatttttcgacagaatatgtagatgcttccatcttcgacagatataagtatggactaggcggggataaggcagaagtatataaaacttcgatattaaagaggcatccatttccagagtttaaaaacgaattttttgtaactgaaaatgtgtgctggtattcaatagcagcggaaggatacttaattagatggtatgacgatgctatatatgtatgcgattatttaccgggcggacttactatgtccggtgcaaatgatgtagaaggtcatattcgcaatttttgtggatataagtattatatagaactgtgcataaaggtcctcccattacgtcaaaaatttgcacacataaacgaatacagagaaacagtaaagagccttggattaagtgaacacgaagccgcagatgcgataaacttttcaggcttgaaatataaaatatattcgtttcttagcagattatatactattcttaggtcaataaggaaagctacatgaataatattaaagaaatgtttaagaatatagggatgcttacaataggaagtttgagcacaaaactgctatccttttttctaatccccttatatacaaatgtattaactacagaggagtatggaacatttgatttaataaataacacaataacgattcttgttccgattatcacccttaatatatgtgacgcgttgtttagatatttaatggacaagaaagcaaaaagcaaagagctagtgggctactcattaagggtgtttgcatatggagtcattatcatactactggcaataggtacgaatgcaaaactggttttttttaaaacagtcagagagtattcgtcatatttcttgttactttatattgtaaattcgtactactctataatttcaaattatgcaagaggaaaagattccataaaatcaatatcaatatcgggagtaattggaacagctattataattactctcaatatcctgatgcttgttgtatttaaaatgggtattgatggttatttcatagcaaatataacaggtgtttttgcacagggtgtttatttgtctatagctaccaaaatacataaggatatagattggagaataaaaagaaataaacagcttgagaaaacaatgcgcagatatagtggcccgttgatggtaaataacatcgcatggtgggttaacagtgtctcggacagatatgtggtcacatatttctgcggcatagcagaaaatggaatttattcgatagcatataaaataccatctataattagcatttttcaatcaatatttgggcaggcttggacactatttgcaattaaggaattgggtaatgagaaagataatgagcgtttttcaaccgtttatgcagtttaccagtttatcataattttgacgtgttcattattgatttctttaaatataccgattgctaaactattgtatgccaaagatttctttattgcatggagatatgttcctttcttgatactatccagtctttttaatgcactatcagcgtatatgggaggcatatttgctgcaggaaaacaatctaaaactgtaatgaactcaactatgataggtgccgcagtcaacattgtcttaaacatagtgctgactccaaccatgggtgttttaggagcagctgtagcgactgctttttcatactttattgtattctgccacagggattgggcagtaaaaaaaataatagtcctgcaagaaaacagaccaagaagtttcatagcatattctatgattgtactgcaaacgattctagggttgcttttgggtgaagcgtgtttaagtgttgtggtgaatgtaatatgttgcattgctgtcttgttaatgtacaacaaagaaataaaacagacatatagatatatgaggagaattgtgtaggatgaatgcaaaaaagttagcaaaaaaattactaggcccacagttaacccacaaaataggtacaaggtttctatttaaagaaaaaccagaattaaaaacattaatttcaccaaactcatcattaaagggaatacaccaagggcagagatgctttatcttcggcaatggtccttcattgaacaacgtagatttttcgttatttgaaaatgaatattcttttacggttaatatgctcacaaaaaatccgaatttttataagttaaagacgaattatcatatgtgggcagatgaaaatttctttaatttggatatgtcaaaacctgaagatagagcaattcttgaatcaatgaagaatgtcaatgcaggggataatactccagttgtattctacaaagacacagccaaggatttaattgaaaaatataaattaaaaaacaagttgaatataagatattatagtcaagggtgttgggaaaactggaatgcaaacagtaagatttcatttgatgaacctgtgcctgggtttggaaccgttgttcactattgcatatgcctggcagtgtatatgggattcaaggaaatttatttgatgggctgtgactgcacaggaatatttaacgctcttgaggcatggatacatttagaggattccagcgcgcaaactttacaatacgcctatgaagtttctgatgatgataagaaaatctctcaaaaaggtcatttaaattgtagtgtaaaaaatgaatttttgggttgggtacatttgttcgaggattacgataaactataccactattgtaaaaataatggtgttgcactatttaacgcttctaaacccactctgttgcaggatgttccaaggataaatctggacagtataatacataaataggtttggagagatgtaaatgataaaaaaatatttaaaactattatatagattaagaaatacaattatatcgacgtccttttgctttggtaggaaaaaacataaatattacatcataagatttgaagacagaatgcattgtggatggactgtctgggagcgggtagtattgtttaatagtatatatgcaatagaccatggatatattcctgttgtggatatgcaaagcaaaaaaaatatttatttggaaaatgacgaagtcggcatagtcaatgcatgggataaatattatttgcaacctgtggaaggggtgtctttaacacaagcgctacagagcggcgattatattttgggcaatgaatcacaggagtggtttgattacataagaatccgaaagagaaagcttaaatccaatgaataccttcgaagacaatatcagttatacataaaatataacgataaaacggaacgtagattgagtactttttataacaatatgcttaaaaaggctaatcgcaatatgaatgtaaggctactgggtgtttgcttaagaggtacagattataggcagtttgggcatgcaataaatcctataatttcagaaattaaacctgatattgacagggcattgcaggaccacaaatttgatgggatatttgtagcaactgaggatgaatcaatcatgaaggatatcactgaacagtttccatcagagatgatattgagttacaaagctggtgagttatcgaatacaaatggatacattggcgatattattagagttactaaaagtgctgatgaggcggccatagattatttgatggttttatactcattgaatagatgcttcggtctcattggaggcgtatgtggagctacaatcgttgcacagtataagagggattgccaatatgattatcttaaaatatatgattttaatatgtattactaaaattcatcttaaaaaggagactaactatgaaaatcgtttcatttattccaatcaaattaaacaatcaaagatttccgggaaaaaacacaatgatgctggaaggtagacctatgtgtaattatctgtttgaaacaatctcatcagttgattctattgatgaaaaatatgtgtattgcagtgatgagacaataaagccatatattgctccatatgaacgtcaaggacttcgctttttgaaaagagattcatacttggacggcttccagataaagggtctggaaattattgatagatttgtgaaagatgtagatgccgatatatatgtactcacacatgtcacgcagccattcactaagtctgagtccattaaaaatgcattagaaaaagttgtttccggagagtatgattctgcgttttcggcagttgtactacaggattatatgtggatgaacggtagacctctcaattacgatattaaaaatatagtgagaacacaggatcttgaaccaatacacatggaaaccggtgccttctttatatttagaaaagaagtatttactaagttaggacaaagaattggtgacaaaccttatatatatgaaattgatccgtttgaagctgtggatgtggatgtagcagaagattttgaatttgcaaaagtggttgctcgttatttggctgagacaaaaaagtagtatgtactttgtaacacaaggagaaaataaaatgaagaatgttaaaattttggattgtacattaagagatggtggtagaatcatcaattgtgcatttaatgatgcagaaataaaagatatatcatatcggcttgcaaccaccaaaatagatattgttgaagttggttttcttcgtgattggcacgatattgagtataaaggaaatagtacgttctttaccgatgtggatcagattcgtccatttgttgataagagcaaaaaaaatgttatgtatgtagcctttattgactatggtatgttcgacttttcatcattaaagctttatgatggaacatctgttgacggcattagatttggttttaccaaaaaggactacgatgaaaattacgatgatataattaattgtatgaatattataaaaaatgcaggttataaattgtttatacagggggtcaattcacttaactattccgatcgggaaattcttgaattagtagatatggtgaattcagttaatccatatagttttgggatagtggatacctatggcgcaatgtacattgatgatgtagacagactgtatgggctaattgacagaaatatgaacgaagaaatatgtatcaattttcattcacataataactatcagctttcgttcggttttgcacaggaggtaatcaagctcagtcgtggaacgactaggtcggtcatcatagatgcaaccttaagtggaatgggcaaagtagctggtaacctcaatacagaacttattgtagattatctagtcagaaaactgcattatgattatgaatttgaagatattttggatttagtcgatgatcatatatataagtatacgctcaaccataaatggggatattcaatccccgcaatgatggcaggtatatataagtcacatcccaataatattgtttacttaacagaaaaattcagactcgaaacaaaggatattagtaacttactgtctatgatagagcctcaaacaagacaaagatatgattatgaaaatatccaacgcttgtataccgaatatatatcagataaagttgatgaccaggcagcaatagctaaacttagagaatatattgaaggtagagtagtgttggtactggctccaggtaattcattaaatacatataaaaaagaaatcaaggactatgctaaaaattacgatgctattgtaataagtgcaaactatgttgcggaggattataaagagtcatttcacttttttggaaatcagaaacgttatgtaaagatgtcaaataagagagttcagggaagaacaattatttcttctaacataaaatcggatgatgactatgacatcattgtaaactatcactcgttaataaacagaggttatacttattttgaaaatactgtaattatgctgttgaacctgctcaaacgattaaatccggataaaattactatagctggatttgatggattttcaaatgcaaaagaagataactacgttgattcaggatttcaaaatgaccgtcatattgtggagtttgacttattgaataaggaaatctcggaaatgtataatgacattaaagcaacattagagggaaagtgtgaggtaaaacttctgactgcaagcctttatggagaataaatttgttgcaaagctttatcttaacaccgtaggggaaaatgtatggaaactaagtttgaaagtgtcattaggacaagcttcaacagcgttgacgcagtaagagatgtttcaaatgataatggcggagaacaaaaaaagcaaattttaggttcggggtgtagggggaaacgttggagtaactttgaattattgcgtatagtagctatgttaatgattatttcatatcattatgcagtacatgggtatgcagattatatagataatgtacgattttcgcaaagagtttatcttgaaatgttttcaatgtttggtaagattggggtaaatctttttgttttagtaacaggttattttggtattgaaaacaataataatatagcaagaataattaaattggaatgtcagacattatttttttcagtttatccagtaataattttaggagtgttaaagctatatagagggactttaaaaaatatagttaaagcttgctttccagtaatatttaatgaatattggtttataacggcatttgttattttattgctgtttaaaccgtggttgaataaactattaaatagcctaagtaagaaggaatataaaaatttactgttattgatgtttgtgatttggtgtgttattccgtgttgcactttgcagacaggtaatggaatgaattttactcagcagatttttatgtttgttacatatatgtttggaggttacattagaaaatatgaacgtaaatgctccatagccagtacctgactaaaaataatgccgccctttatggacggcagatataaataaacttgatcagttttcagtttcctttttctggtagcagcatttcggcaatgtctcggaccacgggagcagctcttcgacataggacagctcttctaattctccatgttttggaagctcttccaaaaggtaacggaaatattcatagggtttcaactgatttgccttcgccgtctcggcaatactgtaggcgatcgcacttgcttttgctccgctgactgtatcgatctggaaccagttgtttcttccgactgtaaatggtcggatactccgttctgcggcattatttgtcatcggtacataaccatccgtcagaaagacacgcaggaatgcttcctggttcagacaatagctgatcgcttttccagtggcagatttttgggcaacactgccttcttttgatttaagatacgcaaaaaaggcatctgccagtggcagtatatggtggatacgtgcttccagacgttcggctggttccagtttggcaaacttctcttcacatcggctcatagtctgtataagctgaaggcttttataggcaactgactcccggatgttcagatccttcttttcggcggcttttactacatcggcaaacccacggcgcgcgtgcgaccagcatccggagattgtcaggtcctctcgttcatccgcaatggaatggtatacctgataaccatccgttacacagatcccgctgaagtctttcaggaattcacgggcatgttcctttttccgggtcttctgaaattcgtaaaggatgaccgggtttgactccagttcaccggaacggtacacccacatccggctctcagctcctgcaggacgtccatccttgcgtacctctaccacggtttcatccgcatgcatcacatgatactccggaagtttttgtttcattcgggtgtatacacggctcaggtaccgttccgctcccataatcgcccagcggcacagggtctgtgtcgggagaaatacatcgctgcgttcaaactctttggaaaggcgttcgattggctgcgcatttacatacttcaggttataaataccagcaactagagacgcagtagccagactgttccggaacagatcagctggacgctctgcgcgcgcaaagtttccgccatccgcacttacatatacctccacgtgatgttcaatcacttcgaagcttgccggatggaattccagacgtttatatacttcgtccggaagctttttgtaccggccatccggaaatgcggtaagcagttcttcttccgacagggtatggataaccactgtcaccggaacatctttgatctcttcctgacgttttcctgttttcttttttccacgtttgtatggtttcgggaagatatcctccaattccggttcagggaatgccggatccagatctatggtcatctctgcctcattgaaagcgaagcaaagctggctgcatccgtcttccccgatggtcagtcctttttctgaggaacggccaaaccggtgctggcgaaggtttacaacttcttctgtcagaaggtttacgcttttctggagctgttcggtagcctcaaagagtttctggttggactcggtggctgccacgagcattttgatcagtgtttgtttgtcaaggttcgcaagttctttttctttaagcaaaaatgccatcgcagtatccctcccttccgttttctgagggatagtatagcagaaaaagtcggttctgcatagccggtcagccgatttctgtgcagttacattcctgaatagaggaacgttccagtatcgtcattccggccaacagaaggtgaagttcttcaggcgagatccctgcagcttcttcctgacttctcggccatcggaggcgtccggcttcgatccgcttataaagcaggcagaacccatcgccttcccagaccaggcctttgaaccggtcggtgcggcatccacagaaaagaaacaggacatccttttgaaaaggatccagatggaactgttcctttactaacgttgctaaaccatcaatccctttgcgaagatcacattttccacagtagatatagatggcctgaaaaccggtgagctcagagagcacggaacatcacctctttcaaaaaagagaggatgtggtccggtgcatctctgctcacttccataacagtatcaccacggcgaatgcggattgctgcatttgaagtctgtacagtagaagcaactgatatctgcgcaaatgtgccagaaggatcatgatcctttgtaggatccggtgtttcacaagcattcaatgccatttttctcaaccggtttagccggtaataatagactgactcctggattccgttggcggcacaccattctttgatggtcagaccgctatcgctgcgttgtttgatcattgcggtccaactggccgcacgaacctgcattacttcattcatacttgaaatctcctttgaaacttagaaaactccagtcaaagtttatggggttttctaagtagatttgatgagattatcatcacataaaatcagtcgcaagtcagcccacggattatggagcatttacatatgaaccaaacattaaacatagtaaagtttatttagcctgtggaatctttttgctagaagtatcagtggtattggtcgaagtgatgtgtaaactctttcaatggaggttttatcattatgctacctattttagatggagtaacaccttaatagcgttcccattatcattattgatatttctttcgtttagagatttaaaaataaaacaaaatcgtataataaatattgctggagggtgtgcattgagcgtatatttgtttcatgaaaacaaatctcttagttcaatattatgggatatactttgcttccatggagatggttttatatttttaataataaatagtattattgtactgttacttgtatatgtaattggtatgattccggggttaatatggatgcgtatagataaacaattgatcccattttataaatggatggaaaagacgtttttgagattggcggtgaaattacaaaatgaataaaaaaattaaatatttagtgatggatgttgatggaacattaacagatggaaaaatatatatgggagatagtggagaaatgatgaaagcatttgatattaaagacggctatgggattcatgatattcttattccatctggaattattcctataattattacgggacgcaattcaaaagttcttgaatgtcgatgcagagaactgggtattactagtttatttcagggaattaacaataaaacagaaaaattagatgaaatccttaatagttcggaatctacgtataatgaagtgtcatacatcggtgatgatataaatgaccttgcatgtatgaagaaaataaaagaaaatggtggtattactggttgccctggggatgctgttcaaaaagttaaggatgtatcagattatgtgtctgctaagaatggcggtaacggtgcggtaagagaatttatagaatggctgttggcggtatgattacttcaaaaaatgaggtaactccttgtaagcgattcatagtcagtaggctgacccaagtccatttatgtgagatgataggtatctagaaggctctgcttgataaaccttgagagaccgttcaaagagtgtgtgaagaaatctctgtaaaagcagctcttctatgataatggcagggctgaaagcttctctatgagcgttcagcccttggtttatatataccgcacaatactgcatatgtcaagactaggcggattcccgcctggtttgaacggtcctggattctcttacatcggcagttggccctcatacatgaggctcagttccccatatacctggccccagttccggattggcatcgtccacttctttgttacttcaaatgttgacaagtacagagcttttaaaagggctgtatcgcttggaaacacgctcctctgacgattcagcttccggtatgtggcgttcaggctttcgattgcgttcgtggtatatataaccttgcgtacagtcgttgaaaacttaaagatggggacgatcgcgtcccagttctggtgccagcttttcatggaattcaggtacttttctgaccatttttttgtgccccgctccaaggcttctaatgccttctcttctgttggcgcctggtaaatcgttttgagatctgccgcaaagagcttatggtccttgtctgatacgtattttaacgtattccgcacctgatggacaatgcacctctggtattctgtctttggaaaggcagcggctatcgcttccttaatccctgtcagtccatccccacagaggatcaggatgtcttttactccacggttttttaaaccgttcagaacggaaagccagtacttggcactctcattttcgccaacctcgatggtcagaacctcttttaaaccatctgaattaatccccagtacaacataggccgccagcttacggattacgccgttatcccgtacagaatagtggattgcatcgtaaatgctccataggcagtacctgactaaaaataatgccgccctttatggacggcagatataaataaacttgatcagttttcagtttcctttttctggtagcagcatttcggcaatgtctcggaccacgggagcagctcttcgacataggacagctcttctaattctccatgttttggaagctcttccaaaaggtaacggaaatattcatagggtttcaactgatttgccttcgccgtctcggcaatactgtaggcgatcgcacttgcttttgctccgctgactgtatcgatctggaaccagttgtttcttccgactgtaaatggtcggatactccgttctgcggcattatttgtcatcggtacataaccatccgtcagaaagacacgcaggaatgcttcctggttcagacaatagctgatcgcttttccagtggcagatttttgggcaacactgccttcttttgatttaagatacgcaaaaaaggcatctgccagtggcagtatatggtggatacgtgcttccagacgttcggctggttccagtttggcaaacttctcttcacatcggctcatagtctgtataagctgaaggcttttataggcaactgactcccggatgttcagatccttctttccggcggcttttactacatcggcaaacccacggcgcgcgtgcgaccagcatccggagattgtcaggtcctctcgttcatccgcaatggaatggtatacctgataaccatccgttacacagatcccgctgaagtctttcaggaattcacaggcatgttcctttttccgggtcttctgaaattcgtaaaggatgaccgggtttgactccagttcaccggaacggtacacccacatccggctctcagctcctgcaggacgtccatccttgcgtacctctaccacggtttcatccgcatgcatcacatgatactccggaagtttttgtttcattcgggtgtatacacggctcaggtaccgttccgctcccataatcgcccagcggcacagggtctgtgtcgggagaaatacatcgctgcgttcaaactctttggaaaggcgttcgattggctgcgcatttacatacttcaggttataaataccagcaactagagacgcagtagccagactgttccggaacagatcagctggacgctctgcgcgcgcaaagtttccgccatccgcacttacatatacctccacgtgatgttcaatcacttcgaagcttgccggatggaattccagacgtttatatacttcgtccggaagctttttgtaccggccatccggaaatgcggtaagcagttcttcttccgacagggtatggataaccactgtcaccggaacatctttgatctcttcctgacgttttcctgttttcttttttccacgtttgtatggtttcgggaagatatcctccaattccggttcagggaatgccggatccagatctatggtcatctctgcctcattgaaagcgaagcaaagctggctgcatccgtcttccccgatggtcagtcctttttctgaggaacggccaaaccggtgctggcgaaggtttacaacttcttctgtcagaaggtttacgcttttctggagctgttcggtagcctcaaagagtttctggttggactcggtggctgccacgagcattttgatcagtgtttgtttgtcaaggttcgcaagttctttttctttaagcaaaaatgccatcgcagtatccctcccttccgttttctgagggatagtatagcagaaaaagtcggttctgcatagccggtcagccgatttctgtgcagttacattcctgaatagaggaacgttccagtatcgtcattccggccaacagaaggtgaagttcttcaggcgagatccctgcagcttcttcctgacttctcggccatcggaggcgtccggcttcgatccgcttataaagcaggcagaacccatcgccttcccagaccaggcctttgaaccggtcggtgcggcatccacagaaaagaaacaggacatccttttgaaaaggatccagatggaactgttcctttactaacgttgctaaaccatcaatccctttgcgaagatcacattttccacagtagatatagatggcctgaaaaccggtgagctcagagagcacggaacatcacctctttcaaaaaagagaggatgcggtccggtgcatctctgctcacttccataacagtatcaccacggcgaatgcggattgctgcatttgaagtctgtacagtagaagcaactgatatctgcgcaaatgtgccagaaggatcatgatcctttgtaggatccggtgtttcacaagcattcaatgccatttttctcaaccggtttagccggtaataatagactgactcctggattccgttggcggcacaccattctttgatggtcagaccgctatcgctgcgttgtttgatcattgcggtccaactggccgcacgaacctgcattacttcattcatacttgaaatctcctttgaaacttagaaaactccagtcaaagtttatggggttttctaagtagatttgatgagattatcatcacataaaatcagtcgcaagtcagcccacggattatggagcatttacattgcatcgatataaagcaccggatagacatcggaaagggggcggttctgccgtaaacgcttcatactcagtacccaaacacgttaagggccgttttcacggccctgcactattttactggcttacgaatggattccggcagtttcggcgaccatggaagcagctcttcaataaaaagcctgttttggttggccatatgtttcggaatctctgtcagcaaatattcaaagtaatcgtatggttttaagtaattcgcctttgcggtttccgctatgctgtagatgatggccgagcttttggctccatttattgtgtctatcatctgccagttcttacggccgatgcagaatccacagattgcacgttcactggcattgttgtcaatgggcacttcgccatccgacagaaataccctgagatatttttcctgattcaaggcataggtaaaggctgctctgagtgtaccctttcgctcaatcaaaggctcattctgtttcagatacgcaaacaatgcatccaccaatggttttactaccacttgtcgctgcatacgccgttccggggcactcaggtctttcagttttccttcttcgcggtagatggcctggatctgcttcatgatcaggtacaatatggattctttttggtgctcttttgcaatggtctgcatggcatcatcaaatccacgtctgcaatggacccagcagccggctattgtaagatcatccattcgtttttccgcggtatgatacacctgatatccgtctgtgacacagatccctttgtaatcctttaagaactttctaggatgttctcctgaacgggtattctgataatcatacaagataatctgctgctctttattcataaaacctgagcggtagacccacatgtagcttttggctccggcatcacgtccatcccgttttacaagaaccggtgtttcgtctgcctgaatgacatggaagtcgtatagcttctcgtgaagccggtcatataagactcccagatattcttccgatagacgtatcatccagttagccatgttcctccggtcaatggtcaggccataccgctcgaactccttttccatacggtgcagggggattccattcacatatttggcgttcatgatggctgcgccaagacttgcggataccaggctccctctgagaaggctggacggatgcggtgcttttaccacgcggttgtctttttggcttgaataaagtaagcgcctaaatattgggtggattgtaaattaactctgctccccccataatggtagtcaggtagtattttactacactttcatttgggagagtgactatggccaaatacaatccacgccgttctggttcggaatggctccaacttattaccgaatgccgccagagcggcatgcccgataacgtatggtgcgaacagcacgacattcccgtgagtagcttttataatgctgtcaccagactcaggaaggaggcctgtgttattccggaatcggcggcattgtccggcagcgcacatgctctggacttcacatcccaccaggatgttgtccgggttaacatgtgcccgaatccaatgacagccaccccctgcacagatggaccaatggctgcagcgcaccttgacaatccacatacaatcgagcttatgacaggcgggattaccgtaaagatcagcaattcagcagatcccgccctacttgcagcggtattccggctgctgaaagggctgccatgttagccgacctctccagcgtggacgcagtttacattgtctgcggcaggaccgacatgcgcaagtcgattgatgggctctgtgcgattatacaagagcagttttccatggacatcagccatgccctcttcctgttctgcggccgcaggtgtgaccggatcaaagcaatcatgagagagccggatggtatcgtcctgatttacaagcggctgactgcccaggggcactaccgctggccaagggataaatccgaggtacgcagtctcacatggaaggagttcgattggctgatgtcggggattgatatcgaccagccaaaagcaatccggatgtcctgaaaaatggcggccttcagcgtggaaagtgtatggtcagatgccggaaaaccacgtattttcagcactttccggcaacggtaatgctgtaaatatcccacgttttgtgctataatcaaggtatcaaaaacaagggaaaaagtgatggcagacagtgtacgggacatccagctgcgggagctgaaggacaccatttcagaactgagtaagcgaatcaaaacgctgcagcagacgatcgagacagccaatacacgtgaggctgcactgcgtcaggagcgcgacaaccagaaagaacagatcgactatctgacgaagcgcctctttggtgtatccagtgaaaaggggaaatgcgaggttcccggacagctgaatctgtttgatgagcctgaaacaacggccgccccggatctggcagcagatcttgctgaagaagagctcctctcccgggaagcaccagaaatgaagccccgaaagaaacgcgctgccaatacagaccgtctaaagggtctgccggttgagcagttctttcttgatgtcccagaagaagaacgtatatgccgtgagtgcggtaccccgctggaaaagatcggcacggaattcgtgcgcagggagctggattttatcccggcaaaggtaaaggtcatagagtattacagcgtgaactatgggtgcccgaaatgccgaaaggaagcggaactcccacagatccaaaagggaaaggatgggcatgcgcatatgattcacgggatggcgagtgctgctaccgttgcatggattatgtaccagaagtacttcaacggaatgcctctgtaccgccaggagcaggactggaaacagtgtggcgcaaatatcagccgaaccacgttcgcgaactggatgattgcaaatgcacaggatttcttccgtccaatgtatgagtacctgcacaagaaacttcttgccagatcatttgcgatggcggatgaaacgccggtacaggtactgaacgaaccgggacggcgtgcgcagacgaattcctacatgtggctgttccgcagtggagaagacggagaaccaccaatcatcatctacaagtattcgccgacgcgggctggggacaatgcgaaggaattcctggaagggttccttggatatctgatgtgcgatgggtacagcggctacaacaaagtaccgggtgcaaagaggaccgcctgctgggcgcatgtacgcagatatctgatcgacgcgattcccaagggaaagcagcttgactacacgcaggcatccgtccagggggtgatgtatgtcaatcggctctttgaactggaggataagatccggcggaaacacgcggggaactatgaggccatccggcaggctagactcgaaaaagagaagcctgttgtggatggattcttggcatggctgaaacaacaggcaccgaccagaggttcccgaatggcaaaagcggtcacttatatccagaatagagagccatatctgaccacctatctggaagatggaaaatgcagcttttcaaacaacctgagcgagaatgcgatccgaccgtttgtcgtaggtcgtaaaggctggctgttcagcgatacgcaggcaggggcagagacaagcgcgatcatctacacaatggtagagaatgcgaaggcaaacggagtaaacgtctaccaatatctgaaactactgctggaaaatcagccgaatgaccggatgtcagacgcagaaatggagagactcgctccatggaacccggaaataaaagcacttttggaattccaatctgctaaggaacccaaaaacaattaaatcatacgtgaattgtcaaggtgcttggatcgcttggtgcgaccggagtgttctggagtttgagagtaaaagattactccctgccataagagctaccgcctaaaattttggcgcttactgaataaactccgatatggtgttcgtccacttcaaccttagcagggacaaaacggtaatgtttcatcacagcgtcctgaagctgcttccagccctcctctccgaattccagcgtaagctgtccggcgctcagataatgatcaaccctgttaacaggcagaccggatatgtgtccctctttccttccagccggttttacaccgcgggttggtttgacctccaggtcttccggttccggaatggccatgttgctgatggcttcagcctcattaaaaaagaggatgttgccatcaacttccttggagcagatctgacccgcatctgtcatcttttctgaggaacggccaaaacgggcctgtttattcagaataagctgttccatcatgagcagcattttttcattgagctcatgggtctctttcatgagggattccagctgttcctgaagattcaggtacatctgtacaaggaaagacttatcaagcgtattcagttgatcttctgtatactttttagccataatcggaactccagtgttttctagttctgattatagcagataccgcgtatttccgccaatccgtagtatttcctctttcgtcataatgacggtggataatccatgtgagaggtttaaatcgcccggtttctcacaatcgttatccacaccagctgcaaccgccaggacctcgttgaagagatcatgcatcagagaatgaacggtttgtggataaccggggagaacttccggtttcctgctttttaagatgaattttaattgatttattttcagcgtattgcacaatgctacataacagaaggaaccgtctttaaagtttcgatgggatgcctggcaaagacctccaggccctgcataagagcctggtattggtcaactgatatctctcgggcttcatgagcggaacggggccagttaaacgaaccattatcaacgcgtttgtagcagagaaggaatccatccccttcccagatcagtgccttaatcctgtcacagcgcttgccgcagaaaaggaaaatagtattctcatcgtaaggatccagatggaactggaatcttatgataccagccagtccttcgatccccctgcgcaggtcggtgtaacctgtggcaatgtagatctttttgaaattccgggtattactcagcatgggacatcaccttaagtaccgcgtccaccagctcagatggtactgttggaagaagctgcagcgttaatccgtttttgccatgaagaatggcaatgggcggggaagaattattttctgccaaacgatcaggttttgtagtgtcaggaagcgaaagttctacaaacactggttttgtcggagtaatgacatttaggcaggcctgcctgactttcctaaggtgataatagtaggtagctttgttggttccatgcagcagacaccaggtatccagtgtcatttcacaaggacggttctggcagtccctaatcaaatctgcccattgttgaatacgaacctgctgtgcaacggaacttatttgagaactcatacttctaaacctccataacttggtataaaaagttgaaaactcaactttttatactgtagtttaatactgaagtatattttctcagatgttttgattttgtggaagggtactagctatggatcgtttacgcagcctgagtaacaacccatcggagaattccctccgcccggtgacattgggccgaaagaactggctgtttagtgacagccaggatagtgcaaatgtgggtatggtagtttataccatggtagagatggcaaaagcctacgggcttcacccatataactacttaaaatacctgctcgacagccgcccaggaacggacaccatcgatgcagaactcaaagatcctgcgccgtggagtgagatggcgaggatagaatgtaacaaaaaatcagagtaaaacgctcgctatcctggcatcattatgtgatgtcagggtggtcgtgtaatctagtttgtgtatttggaaaaaaatggaacctttttggtaagaattaagacatgacaattcttatcgaaaaggtgtatttttatgaccattgcaaaggagcaattacgatagattattcccagaacgacatctacacagaacaccacttggattgctatctgttttgggactaggtccagcctgaccacttcctgcacagtaggaggaataagcgcttccctgaaaaccggatccgggatgtcacaggaggctttctttctcagacggcttacccagttgtaaaaagtccctggatggatcccatgctctttgcatcactagtaatccgtgagggcgctgctccggcattccatgatcagctgatactgttggtcggccggtactctgtccttgtaagtagacattgtatgagacacctccataattctgtagtaaatgccagcctctatccaaacgcaaaagaaatttgggagtgaaatgcttgcatctagctatactcattatgaggcaaatggtagttaaataccagccaccctaatatttggcgcttactctcaaatattttgactttgcgtaagagtactgactatggagcgtttactgtttggagatactcatcacaaaaggagtatatcaaataaacaactgagtatatcattgcatttgtatatgactcaaacaataacataacaccagtagataatacagagactgttccccatgcaacaatcttgcttggtaatctccgcatccttttaaccatctcaatgattatcaatataaataaaaccatctgaataatcccaccttggatgagttgctgtaaataatgattatgagcatgatctgcccaaaaaccaacatgactcaccataacatgaaacgaatatgaagatccatggcctataaatggagactgtaaaatctgatgtaaactttctttccatataaaagtgcgagaagtaaaactcatatcgcgttttaatatatcctccacaataaatctcaaaatatatatattattttgcacctgcaaaataaccactaaaacaaaagaaaatataatgatcgcaactactccccttatttttattaaactcatgttaatagccctttgcaaaagccaaatgcttattaatgtgaataaaataaaaactgttgtagcagtatcagatgcgactgcagtatataaacttacgataattgtaattattgacagaaacttttgttttcctttttctatcgaaacaattgccaggcataccgctggcaagatatatataattaaagcattacttcctgttagaaaccaccctgagtctcccgcaaacacctcaatacttgaccttttaaaaaaattaagccctaaatttagagttgttaaacagaaaaagctcaatagtaggggcttccttactctttcaaaaccatatatgtaaaaatataatgcaagtccaatgatagatattactattctgactgttgataattctagatttttgtgaataactgacgtaatcaaaataacaattccatatataattgtatatagagtaattttgttcaacctaagatgattatacatacagatgatggtagaatatataaatgcaaatatcgtaattgcctgacatactatatgcaagatggggatataaacaaaataattaggctcaaaaaatgatataaagacaaacaggaaccagaaatcttttaaattcttttcctttattatatacattcactacatcctctctatcattttagtatatttatgtgttaactacttgttttaaatccttgaaaccaaacaatccacatactatcaagtaaaccatggatacatagatgaattttatagtctcatcattgataaattgttttaaggcataacttgttacaaaaccgatagcactcaatgcaataacgtatacgatagtatgccttaaatcattaagttctaaattggtatatccctttttattagcaaaaataatttgaagtacgactgttacacaataagaaattgatgttgccagtgccagtccatatactcccataaaattaactaggataaaatttagtatgatattagccatgcaaccagctatatctaggcctagtacaatctttgtattctttttaatataaaataatttcgaatatagattttttatacaataagcaatcgaacctggtagatacattattaaaatattagctatagtaataatgctgccagcagacatgtttccatgtccatatagaagattactagcgtactctgcaaagaacattgttaatatcgaaataggcaaaacaagcttcaagagtatcaaaaaatattctctaaaggtattactaatcctatattcatcagactggattttgctcatgattggatatgcatatgttgatacaatataacctatgacattatatataatcatggaaattacatttgcatagttcaagcatgcaacactacctgatttaagttcagaagccatggacttatcaataacatagttaagctgccataaaaccgtaatacataacattggtaaggacagtcgaaccatatccacaaaatctttatctcttggattaaggtataatttatactttaacggtgttgacctctttaattttgttgttactaatataagtaagattaaatacgcaacaatacgacatgacaatagtcctaaaataccagcatttggcattgctaacaaatatccaataacaaccacatttaatattacactctcaagtgataaataaataaatatctcgtaagtctgtaatactatcattatataatttaccagaaaggttagaattaacataataagatttatacgcgtaataaatattatctgcgaaatatcatataattcaaaatatcctggaaccaatagtcttaataacgatttagtaaatactaaacaaaaaactgtaagaagagccattatagcaattccacagtttaacagtaaattaaacagcctatttctcttatgcgcttctaatgataaatattttggtataaaagagcaagctaaaaaagtagagaaaattgcataaatttcattaataagactatcctcgaaagaatagatatcagatacaaaaccagcaccatacgtagatgcgaccatagcagtcctaataaaacctaatgcctttccaaataataatagaaaggacatactaaaaagaacacttaaaaactttttattcataacatttgcttagtaaacactttcttgattttagttttaattattttgggcattattaaatacacgacccttcttattcctgaatattcggaatatgcaaatgcttctgcatattctacattattaaacatacctcgatagcaactgagcgccattcccttatcaacgtaattaatatcagcaatttgtgacttatgttgttcaatcattcttttctttttatctttgacagatgatatatctaaaaaccaagttggatgccttagcggagtccaaacttcatattcaaaaatcattgcctttgcatgttggctttttttcatctttctgaagagtttaagaacaactttatgatccacatggctctcatatctattgggcacaaaaatataatcgtatttcttaatgtcttgttgatatacctttgttttattcttggcaacattcccatctactatatccaagaggattatctggtttgctttagctattttaacggctttaaaaaattccctctttcttgttaataccaattcttcttcatctttatatacttcggtagtatgcccttttcgtccatccgttagaagcatcaaatcacattgctttccataaagcgacaataaacctccacagccgatactttcgtcatctgcatgaggcgaaacaactagaatgtaatcatcttttttaatatctatattcaattttattcctccaattggcactttatcttcttaataagtctgtttaatgttttaactcccttatttcgataaatctcaccgccatacactatatactcttgagagccgaacctagttttataggattgctttccatttcctagaaatacaactttagcatttagccctatcattttttctaaaaagtattcatatagaataaacccaggtgaaaacttgctgtattttgtatcataacttagattttccaaatatactgcactttcatttttacaataaaataatattgcaacatagtttccatcagcagtgagaaccattgttccattgacatgatatttatctaagtattccttacccgttaatccataattaataccatgtgtttcttgtttccatttaaaaaacaaattcaagatttcgttaggtgtactattttcatactcaataaattgtagtttacctgtttgttcctctagcattcttttttcacgtctgaaattatatcttgattttttactcagtcgttctaagattttttctggtgaatttggtaggaatatcacccaattgttatctggttttaattgatttctgcagtttgcagccgcgtgattgatttctatttttaatacttgcttatgaagtttaaagatgtattcaactaactcatctattactactggtggtaatggctttaaccagatatttaatgttgatttatatctatttactgtataataaattgaatacatatttgaaccatatgaaagttcaactctatatgttttatgcggcacatacaaatctggacggttatatatcatataatcagaccaatgcattctttcatttttaacttgtaaggattcttttgaggttctaaatacccttatgtgatattcagaatctaatatagaattaatctcattttgtaggttttctttaattctatttagatttaaataaggaacatcttcaaagttcctatctgttgcataatgataatcatataaatcgaaacctataggctgaaatttttgagaaaattcaaaatccattaaatatatatcaccatcttctctatataaaatattatttggtgtgtagtcgccatgttgaaaacatatttttattgtctcaaaattgagtaattcattgtggaatgtctggaacgcatacaattgttttagtttagcatgatatgcaacaggccaactcgaaagaaattcagattcaattttgttgactaaatcgtttgacatttcatattcgacactataattctcataataatctataatccacgtgtgtggatatgacccgcatacttcacctgtattactaaaatatctatatattacatagtaaccatcctcaagctttccggaataaatgggagcattacatttcattcctgtcactcccttttgcaaaaatatcttttgatattgcacagctcgtcgtgcatagaactcttgtatgtctgttctggcaaagactacaaggtataaatcaccttggggattatgacaaacaaactgttctgggcaccttgccgttttcttattgttaagagggtaatcatattcaatttttatatctaaatcctttaaaactagcatacatagccctccccttgatatgaattagcccttaataacagctattgggcatgtctttgccgcccttttagctagattattcttttccatctcatttacaatcgcaacaggatccttaaaagcatgcatattttgctctgcaagatttccagcgccaactctaaacaacgcaacgcttctttgtctcatttctgttgttgtcatttcttcagagaagttttctttggcaatatgtttatcctgcattctccctgttccatggttagcagaaaaaaaggctttctcattaaaagtattcctcatgatataagagaagtttcccattgcacttggtaggatgcaatattcatcatttcctatgttttgtacaccgtttctatgtactaccttcactctgccatcgtataattctactgctacgttatcatgagaatgtgtgcctatttttatctgatttatattttgagatttataccatgccttaacaattgcatccctattcatttctccaaatatcgaagataaattatgtgcaagcatcagatttcgtcccaactctgtcctaatatcaattgcctggtaatcattctctggattaagaatataatgtaaatctgttactagacctggtattgctctacaaagtcttttaaaatatctatactggtacaatctaaatttagcgactctgtacatttccctcaaggagccattacttttcatttcgtgtaaatcagaatacaactcgtaaattgtatctcctacagatatagagtctgaatgaagcatataaataaaatctcctttttttaccaaattacaatcgtaaacttcagtaactcgatgtaattcaaaaaaatgatttcctccccccaatgtacataatgatttggaagccacattcagtattcttgtgtctagaattgtatgcgctatatctaacaaatcattaacgtctttaacttttaaaaaatcatataaaaactgtttcttcacataatcttcttttaagtattcatcgaaaacttctaatatttgagctcgcgtatattggggcaaatcctctcgtttacgtaagattgtagagaatctcttaaaactatttattagaatttcttcatttgtattttcaattttaccgaaagtatatccgcagttttcgacccctaaacatgccaaataaatattataatcgctgctaaccaaaacaccattagcaatcatagaaccctttttcatatgaacatcaggaaatacaagaatatccgcgcctgaattttgtgcgaatttttctattatctctgtagaattatcatctggtatataaattgaatttactaggtatttcagactcatttcagtattaactcctttgctaatgataattttccatttggaacggaaagtgaagctatttgtacctcaatttcattgtgcttaaaaacaagagcatgcatcattaaccaaaatgacaatattttatttgcttgtccaatctcaggagcactttccataaacataatccattcgtatggagttaaactatccgtatactcagttatatctgtatttttataatctctaagaagattatatattttatctatatgacacataccatacgatatggttttaggaagtacttctttaatttttttattaaaatatataacatccaatttggttggagtatcattttctaatctcatagctatattaaaatttaatgcatcacttccattaaataaaataatattatcaccgagaagcaaatgagattcgtttgagcaaatcatatctgctaaagtactttttcctacaccatctaatccagatataataatattttcaccattgtttaaatgtattaagctaccatgcacacaaaacattccaaaacaggcagaatatactgagattagcggaaatagtgcacattggtaaaactctcccccctgaaatgcatatcttttttcttctgacctattagtgatattatgatataaatattttagtaatgccttcttagttttagatttcataacatagattttgacactaccgtttttaatagaataattgtaattcccaattaataaacactcgtttttccaataaacattacgagacaatcccaaattttttcgagaatataattgaaattttctcacaacttccttattatcaaaagataaacatgattgtatcccgtgcatcttatcacttgtgactttatatgacacataataattcaagaattgacgtttaacatactcaaattgctcttttttttcgaaatttattctacatattccaattaacggaaagtcaaatacaactgtatacattacgcctcacctaatttcttaaatacattcaaatatcttcttactacgatatttatgtcataatcattcttcctttgttcagcaaatagatgtgcaaacttctgtattttttgagatgatatatacgattcaattactttttttaggccaattggatcatttgtttcagcaataagctctttgtggtaatcaagaatctcgcttacaccatcgtttggagttgacaccactgccaaccccgaggcaagcgcttctatcgcaaccattccgaaagattcattatcagatggtataacaagtaaatttagttcatgcataatatttggaatgtcatttctttctccaacaaacaatatattattttgtaagttatgtctattgatatactctcgaatttcttctagataattattttcgtctttattattgtaaacacatcctcctataagcaagcatataatattatttttttcctttaccagtacctcaattgctttaacaagtttcaattgtccttttattttttgaaagcgacctactacacctaaaagaaagtcatcttcgttaagtcccaattcctgacgtaggcaacttggctctgcctgctcatattttgcgataggtattcctaaatatgacacgctagttctgcaaaatcccatatcttttagtgattcttctactttagtcgaaacgcagaaaatatggctattgcattttttgactaaaaatcttttaaagaatccaaaatcataccattgtccatggcaagtccagaagttagttcttctgattcctattgttgcaaaataaaataaaaccgatgtcaacggatcattattatgtattatttttatttgttcagtcagtataatatggcgaatcttaaatatatttcgaatcaacatgcgcctacttcgataattaataacataggtttttactcctatgctctctagtagtcttacaagtgtaccgttacatccgcagataacgacaattttattatccgtctttagcacattacagatattaaagagactagtctcaccgccacccattcctgtaagatcagaggtaaagagtatattcatccgctgttctccttatgatattagaaatttgtcaaaaacagtcttccatgaatgttgctttttaacatattcctttccattctttgcaatatttcgtcttaattcagcattactaaataacgtaactattttttctatccactcattatcttctacaaatatacaattctcttggtcaattaaaccgttaataccttctctgcttacactagaaagcataacgggcatacctgctgccattgcttctagaattttgttcttggtaccgcttccatacctcaatggcgaaatatagatagatgattttgtaattgtctgtatcatatcgtctacaaacccagtaacaataacattttcactttgaagttccaacaaatcttttgacggattcttccccgccagtgtgatggtacaggatggaatgatttttcttaactttggaaagatatcacgtgtgaaataaatggcagcatcttcattagggccgtaatccattacaccagaaaagaccaaagagtagtcatgttcaggaatacttatctgattttcttttggtatttcaacacctaaagtgagggaatcaaacttatctttgaaatacggatgaagcacttttgaatactctgcatctaaatgtgaaacatataacactttatctactaacccataagatttcgattcatacttcttgaagtagctacattgaagtttatcatagattttcttaaccacccatttatcatgctgatatttacgactatacattaatatatgattatcgtgcatcatagcaattattggttttaccttaggaataattttcaaaaactcaagagaatacacctgatctaatataatcacatcatataaatcatagctgattttaaggttgaattgctgaatggttatatttgttaattgatcaggcattccaacaattaaatttctaaatctagaaattttggatggttctttaaatagtttttgataataaattttttctacatattttaggatttcactttctgcaattgaatcttgttctaaataatacagcacatctatatttactcccggagatttattaagtaggatattatatatagtgtgtacgccgccatttttataaggaggatatgggcaccaaggagtaataaataagtattttttatccataactaatcaactatctttctttattataagtaattagtatctatcaatacattcttgataaaacatcaaagtattttctatattttgctgtatagaaaatttctgcagagctctattatgtaggcctacactgcatgtaattcttttatccttatctgatagaagttctgcaattaacagtcccaaacttttataatcgccaggattaataaggggtatttccttacctaccagctctggcatagttgagatgtttgttgtaacaataggaatcccgtaacacattgattcaattaccgtcatagataatgcctcgaagtacgaaggtagcacacaaataattgtatctttaaataactctaatcttttttctgtattaatccaccccaacatctgtactttattttccaaatgcttttctgatattattttagctatatcaccctcttcatcggacccacataaatataataaaaatttatcatcaattttattttttatgtattccatagcatttaaaaggtcatatattcctttcgtcctctttagtaatcccagataaagaatataccttccgtcagcattatatggattttccttcggacaattagaaccattatataaaactgctattttatcagaatcaacaatcttgttcagttgcctcttccagtactctcctaagacaagtatcttgtctgctttgtttaatattctcttaatatgtttctggctttggctggaaacccctaaataccagtctataaacggtccagcatgtaattggactacaacagtttttttgaatacttttccaatagataccacaactccttttctaaaggtacttcctctttcggccatatgtatgtgaataatgtctatttttccaaacatcaatgtcatcacaatttttatgtaaccgattagcataatagctgtacgcttgatttttgaaccacacgtagaggttgcaatatatttcatattgactgctgtattgtagtctctatcatttatgtacgtttcggctaccgtccacattccaccaactcgatttttatctacaccaaccatcaaaacattcattttaatcgcacaccttttaatctaggataatttagtcaatatatattgtatctttactttttaaacgtttaagagcctcaccttttaatactgtattatctatcatttgtttgctatgtttgtctaaaaagttttctatatccataatatactttgcgggagttccccccccacacctgaccatcaggaatacatctggttactgtgctatttgcagcaataatagtgtcatttccaatcctgacccccggtaaaatcacagttcttgctccaataaacacattatttccaataataacattcccaatttttgtttttcctagcttttttttcattgaagcatcatgtgctaagatataaacatcttttgctaaggttacattatgaccaacagaaatatacttacaaaatgcagaatcaatgttcgcacctttttctaagttgaagtttctcccatgtacaaagcctttgctttcgatccattttaaatagattttagtagtaatatttctgagcacaatacacacatcctttaatgaattagtaattaatttgtatataattatcactatagatattcacacacttatctatatttccaaatcaatttcaatattttcacatcatcaataaaatatctcttaaacattcgtttgggctcttgcataaatcgatagaaccattctaaaccatgattactcatccacgttggagcccgtctcacattacccgccaaaaagtcgactgttgcacctgcgcagatggaaacagttgcatcatattttttataattttcataaatccatttttcctgtttcggacaaccaaagcaagcaatgagtaaatcagggtgtgcattggagatcataatattaatcttatctaattcttgaatatttttctcaaaaccataaggaggggcatatgtaccaactacatttattttcggcatactctttttgagatttttctttgctttatcagcaattccattagcaccaccaataataaaaatactatacccttcctgggccgcttttttacacaataacggcactaaatcagagcctgaaattttagtctttacaggttttttgtgccattttgaaatccaaatcagaggcataccatccacaaggaccaaatctgcattatctgtaatctcttttaaataagtatcaatttcaatttttaaaacaacatctacatttacagcaactatgtaagacttttttttaatagaaatcaaattttctattgcttgaatggtctctttcatatttatattacttacataagtatttaataacggctgctttttcatattattaatttcctctaagagtttctaacttcccctcacattattatcaagtatcaaaaataaagtaattctagatatgatgtgttttgggttctctggtggtgaggtatctcaaccaattccttagctttaatttctataaaattctataacattcaatctgaaaacgtattgaatgagtcctatcaaatagcatcataggattctggtccataataaatcactctagtgcctccattctcaaactcaaacggaatgtgcattaaatcgttcatcgccttttttaccgagtcttgtttctgtggctgtacatagaaaattagaaatcctccaccaccagcgccaaggagttttcctccaagagctcctgattccatccctctcatatacagattgtcaataaaatttgtactaacagaagtaccagtttttcgcttcagtttccatgaagtatcaagcaatcgtccaaaatcatctaaatcgttggtattatctgtaagaacctgctctgcctcattcacaagtccatacatcttctttagaattacatttttgtttataagttcacttgaagcatttgctttctgtatatcagaagaaaaacgagtaaatcccgtaaaaaacatcaacaaatttttattaagttgtttttttctttctggagatattatgattggaagtacctcatacccccctgggccaaaacttattttattgaatccaccatatgatgcggcaatttgatcttgccatcctccagtttcattgcataaaacacgttcgaggtaaattgcctcatctgccaatttccttttgtctgcatatttgccttttaaggcataaaacgcatttagcatcccaaccgcaaaagagcttgaagttccaagccctgaacgagcaggaagatcagcctcatagcttaggcgaatctcatgcatatcaagcatcttcatagcctcacgtatagcagggtgttgaatagcattaacatcagttaccctttctgtttttgaataagaaagttctgtggaataggcaaagaatcgaggtagatgcctaacgtttacataacaatatttatcaaaggtagtagagaggaccgcccctccattctctttgaaataattttctacgtctgttccaccaccaaaaaatgacatgcgaaaaggtgttttggttataatcattttcgttttgcctctctattctatcttcacttttacatgatttctatttcagcttatgttaaacgtcaagtatcgtttagttgatagttaaattattcattgaaagtcctacagtaatagaagcatactatgtaccattttatttacacggatatgttttctaaaggtgaagtcatacttactacaactgtctatacctaaaatcccgtattcagattttcaaaatctaaatacgggtcaatctttgttttgaaaatcatcgaataatcttcatcatcaaataattgctattatttggacctcccacaatatacccgtccctcacatatcaattatcacgctgtctcccatgtatgctacctgcaccctatatcgagtttaatataacacgttccgtttcaaacttcaacacattcatgcaaacttaagatatatttaactggaattaggggatctgcctgggatttaagagaatctcttccactctatctccaatcaacgatgctaatgcaattccaaaaagctattccatgcctccttattagtaagttcaccaatgttattccgataattttctgcttcaagctgaaactctctcaccagcatatataatgtaccgataaataacatcgacaccttaaaaaaatccttatattttttctcaaataataatacctttttactattcaaatcatacagaaccagttttttctttctgtacccatcatacgctggattcttaacctgtactacctttagttcatttactgccggtaatacccatccattgaatgttattaaatgtaacagttttctcttagaggttctttctccagaatcataggagaacagcccatgattctcctctagaaactcttcaatctgttgaattgcagaactatattcatccttcgacagttgcttctctaaagcttccaacgaaaaaggtctatatgccttttttaaaacctcttcgtgaagttcctccggtttctgcctgtatagccatcccggccctttcataaagtcttctatgccatgacaaatcaaagttacatctttatatctgtaacgaagaatactcccgacaacgcgcttgcataaccactttatagcagtttctttatttacattctgaatggccatctcaatcaacccgttgcgaacatcataatacatatttactcccggcatccccaattgcacatccttatgccatacatttataccgtttaaaaatacaattccggcattctgattccttattccatactcaatatcatcatgatggataaagaaagggatcggaagattatcttcccttactatatccaaagaatagcagcaaagccaccagcccgaatattggttatattcattcccagattcagtcagataactgcagactgcattatcataatgacgtatatccaaattagagtattggtttaccaccgtataaccatcttcccaccactcccctgcgctgaaaagtatatggggacactcttcccgtaacaaaattcctcctactgtaatatttttccactcattctttactgtggtcagaaatccataaagtctcaccagtgtatccggctctataattacgtcatcatccataagcaatacatgtgtaaaactttcctgagccttgcgattcagtatttcaatcattcccctggtgaacccgcctgatcctcctgcatttatattgggaattatgaccacacgcttgctataaacctctgctaaagcttgaaccgcttcgcagtcatgcaatgttcttccattatctatcacaaatatttgtatgtgtttggatacatcgacatctgtattactccacagcttctcgcttagttttctcagcgttctagtgatatattcctcccgtttaaatgtacaaatatcaattcctatatttactaaatgaaaattctcttctgctatctccgcataataaattccttttactgtattctcagtctcatcctcatttacacttaaagcaaaccagaaaaccccttctgaatagtctgcatatggcaattctatagtatattctttttctatatccggaaccaagtcaaccgttattaaatctgtttggttatgaacaattgaaagttcatcataacccttcaaagaaagtttcagatataacccttcaatctccgtataaaccttccttttttctatataaaacaaattgaaatatccatcgaaattgaccctttttcctactctgtgataataaagttctgattcatcgcatacatcatgtgatggaagcagcacattttgctgttggatctccatatccctttttcctttcaattccatttatataagaataggccataataaaactattgtaaccaatccataccaattgcggatcaaacgtactgtggagcgtaaacataacaaaaacaagcaagaaataggtatctttattttttgttatgcatatccccagaataataagcgccagtaacaaaagtataaataacaccactccaaaatttaaaaggatttgcatatacgatgaatccacataattgtacacctttccttccggaggttcccccccaatccactctatacgttgtcccaacagatgtattccgtattcttcgtacccttttttagctaagaataaccttcctgttattaacttatcaatttgtttcatccacgcttttgacgcatcaaacttggcagataaacctactattgtaaaagccaacatcggtacaatcccaacagcaataacggaataaatttttttatagtctctcagatatttaatatattttaatatgagtgttccaataattgcagccacacctaaaagaaaggaattttttgtatctgttttccaaaaaagaaagatactgatacataacatcgcaatgatttctttccatgtaaccctttctcttcgccagtaaatccatagcaatatagtataaaaaaaatagttactgctttctgtagtatattgaaatcccaggctctctctaatccgggttccaccatcttggtaataaatacgattttccaagatctgcagataactactccctataatcaaaaacaatccaacaagatggacccataatgaccacttaataattctggaaaattccacatcgtgtgctgctacaataaaagcccaataaatcaacatgttcttatctttggtaacatatgcaactataataagtaatacaccgatcagccctattatcatgatttcattaatggagaagcagccttccaaaaaatccatcaaaagcttgcagcatattagaaaatatgctgttatcctaataaatggaaaaaacagcttcagataagacatttccccatattttgaactaaacaatattaccgaaaacagatatatgacataagcaatgataaacatcctcttcttgttttcttcgctcacagcaattttcatatatgtctccttctcttattccaaagacttttaattatctccatcactatcagttccctaaacaacagcagcattcccccgtaaatcccgaaaaatcctccaaaagatagtatcagcatcggaaacagcttcaaattcaagttttctcgtaaaaacaccaggaatataccagctacaaatacagacgaaccaatcttcaggaactgaacctttttaataataagcaaagcatcttcccttaaatcggcaatctgaatgcccaaaacaaccagttccgcaattagggtaccaaaagcagctcctgcggctccatagcgtggaatgaacataacatttagagcaatatccactactgctcctgccacttccgaatgcaatactcgtctctctctacccaatggtaccaatatctgtacaccaaacacattacttgcccctataaatataagtgtcggcataataatacgcataggcattactgacggcaaataagcgtctcctgaaagcagcagaatgcactgctgtgccataatgataaatcccactgtcaggggaattgataacgctgtcacaaattcaagtgcctttgctgaaaccatccaaaactcctcatccatcttcttttctacataataagatgtacgtggaagcagaactgctccaagcgatgtcactacattaactaatatcaccttgattttaattgcaacatcgtaataccctacctctgtgtcgttcttcatgaatcccagcatggtaatatctaaattagagtatatcgttatggcaaccgacatagcaaagaaaatcacaaccggttttaagtgctttctgaggtcataatttttaaagcgttggaacgttatgtgttttctcaaatttataaaatttagtataccatatcccgtattagccagcacagtaattcctgcatatatcacataatcgtcctttgattttaccagaagaaacataagtgctactgacaaagccttaaatgccagggaacgtatggtaatataagaatagcattccaatgccttatacagccactccatagccaccagattcaaaaagagtgccatactacagaccagcataagaatacgttcttctttaaaccgcggtacacacaccaatacaatcatgagaaaaaaataagcactcagcgtcgtaactgcattaataagccatatctcctgggcggttttagaaagcagtttcttgtcatctcttacccgagcgcaggcccgaatcccgtaggtcggtatgcccagcaaagcgaacatggaaaaataggtgataacggaattggcaaaagctatctttccatttccttccggctgaaggactctggtaatatacgggaacgtaatcagcggaaacaagaaggctgatgtcgtaagaagcatattcataatcaaattgaattttatagacttccttctatttgtcataactctctatccgcctaatttccaaccaggcttatatatggaatgaagtcctaaccgatggtttcttgcatcggaaaatgcctcctgcaatatattgatttcaatccgcttctttccagacaacaggttaagtaaaatcttaatccaaatctttatgcagaaataatcatagcatacccccttaaaatgtttgctgtaagtatcaatcatatttcgatatgcataatataacttccaatttattccttcatcttcttcatccacattatgataggctacaattgaaggaatacatacgatttttcctaccttgctcattctcattccatgttccaaatcatcccagtatataaaatagtctttattaggaagtcctgcctgcaggagcttttccctattcatgattgcccctacatatgtaaaggtattcatttcaaattctttttgcaaatatttttcagcagggataattgtttcacatatttgaatccctcttttagaatacatttttccatgagaaatatccatctttccatttttaatcactttaccgcaaatagcagaaatccctttaacttccccctgcgcttccaggtaatcggacgcctgctttaatgcatcattttgtggaaatgcatcatcatcagaaacccatatccactcagcatctaactccaatcccctctttaaccctgcatggaatccgccgctcccgcctgtatttctctccattgtaacaacaattttttcaaacccgcatggctccatcttccattttctcaaatattcagatgttccatctgtgctagcattgtccaccacaataatataagaaggaatgtgtatctgttcttcaaatttttccagcgataattttagtttactaaggcggttaaatgtaacaacaacagctcctattttcatctccagccctttctcaatttaattaatattttctctttgcaaatataaaagatatttttgcggatcaactgtttttcccctgtgatttttaaatccatccctcattgattttataatcatccgagaccgaaggccatgatatcccattaatctgctcttaataataatagctgtcaaccttgctgtatacaatccaaaggctaagtatcttattcctgcatttctatgaaatttacgaatcataaaatattgatttctattgcaataatactccttccaccaacctttgggtgacatattctcacttgttacaggtgcatcctgatggttaataatggcatccttaatcaggtatagcttgtatttgcgggatatacgatacgtatattccgtatcgtccccatatataaagagactcccatctgcgattcccagctcatctaccactttttttggaaataaagggcctacaaatgcatttgcatcctcttccgtaattttacccaaatcttcatattttcttccaacaggactatttttcagcatcaatcgcgagagctttttgtggtgatataattggaaacgttctaaatccacaccataaatagcagggcatactcctcctacatctggtaatatctttccataagacaagaggcttttcagacaatcctccctcggataggcatcgtcatccataagccaataccagtccggtgaaaactgagctgctgctttcataccagcttcaaaccctcctgcgcctcctaaattatcatctaatgaaactaaatgaatatggttatttgtcatgaccatatcattaatctgttttttttcatcttcacagctgttattatccacaacgataatctcatctactgcaatactctgatttaacaatgctgacaaacatttccttaaagtatgtattctattgtaggtaactgtgatcgccacaactttttctttcctcgatttgtctatatacattcatcaatatcctctcactggtgtgccacccaaagtgctcccttataaaccttcttccttcatgcgcaacttccctcctgcgtacatcctgcctcaaaaaatagattatttggctttcatactcctcatcagtctccgccagtacaattacttctccctcttcatcaattccctcggctcccacttttcctgtgataacaggtgttcccattgcaaggcttctgagtacctttagtttaatcccggcgcctaaagtaaggggaaatacggcgagctgagcccgttctaaatacatatccacatcctcaacaaaccccgtcacatggacaaattcattttccatagccttaagtgtctccggcggttgatttcctacaatgtatacctgtaattgcggtacctccgctctcactcgcccggctatctcaattaaccgcatagcagccaggtagttctcctccctcgccatctgtcctaaaaaacatatggttccattaactttatttgaatcatctatatctctgtttaaaattttatcatctattccataatatggatttattacaaaacaatcctctctcccatatcgctccgcaatcaggcgcttatctttttgatttaatgcaaacagataatctgcttttgtacagtatttcatttctttttttaatatttgttgcagctgatgtgcagtatatatcttctttattccgcggcatcctttaagctttctttcataagactgcgccgtcatatcatgctctgttaaattaaatttaagtccggggaaccattttttaatccatatatattggcccatagatgcatattctgcatgaatgacatcaattttatatcttttcaccatatatatcatcatacacgaaaaacgtatcgaacttctggcggcaaaataattaggcatccatggttcaactgccatatgaagtaaacgggtaaagcgtgtaacctttataccgtgatagtcccctacatgtcccgtcttaaggtgattatcatatttagatgctataaatgtaaggacatatatatgatgccatttctttaatgcctctatctccttccccatacaaacaccacccgcatggtttgcttttagcgaaggaaaatacggtgagatatgcaaaatattcatacttctactccttcctctccagcaatggtagtatacttccggcgaggacccgttctaaagcttctatagaaaataattgattatataatctttgtattaaatcacgcctctcctgtaacttgtcagcggcttctacaattctttgagcacatcccttatagtcttcccccttgcaattgattcctatatcatactcctccaccaagctccaagtatctccatgtatattattaatcagcggaagaccataacaaaaataatcaattgatttcatagtcagaccaacacatattccttccttcatgatattcataccaaaactacatttttcgaatatctttttcttctcctcctcgttatagacaatgccataatactgggtgtctatacaattctccctcaatttattcaaaaatttctcccgactctccccatccccaatcacatgaaatttaactatctttaactgtttaatctcagacaggatatctataatcatgtccatgtctataatataattaatcgaaccaagatatgcaatgtggagacagtcgtcaattttatgcggtgtcagattgggggctgtttgctcttttggccaatataatgtcgctgtattcacgacatctaaacgcaaaagagtccgatatagatcacattccgtcaatacaaaatctgctttatcaagatacgcatcacgcagtcttccccagtattgaattggccaaatccatttaaatttcttgatgggtaatgactcaggccataaatctatgatatcgatgataagcttgaaatgttgtttagactttagcctagctgcaaccggggccagagaatttgcaggaatcataatatatagcaaatctaccctttgcttttttagcaaatggtagactctttgagcaaaatcgtaatgagaatataaccttctaactgataaattttttttataagttattgtatccacataaaaatggcctttcctctcagcaaacctctttttcttttctctgtgaacaaagtctgactctatccacaaaacatgatatccttgcttcaagaaaaattccccaaccttttctgcacggggctcataattggtagaattcgttactataactattcgcttcttttcagtattttctttcatcttccttgccttcttcagatgcataatctatggtcttatattccattgctgccgatacttcatcagaaaatccttcagtcctctctttttcaaacagtattttaactgtcttaaataagatttcaatatccaataacaacgaataattctgaatatacatcaagtccattttcaatttatcataagcagttgtattgtactttccatatacctgcgcataaccagtcagcccgccctttacctttaaacgatatgaaaattcaggaatactttccgaatacaactgtacatgctcaatcctctcaggccttggtcctactaaactcatctcaccttttagtatgtttattaattggggcaattcatcaatcctcaattttcgtataacttcgcctacaggtgtaattctcgaatcatgctctgttgccggtaccgcgccatctttctcagctcctacaatcatactgcgaaacttacatatggaaaaaacctttccatcttttgtacagcgttcctgataaaaaaacacaggacccttatcgtatatttttatagcaagtgatgttattaaaaaaatgggtgctgtcacaatcagcattataagcgaaatacttatatccattgtacgcttgatagcagcctgctccaccgtcaaaccgtcatttctggatagtagtaacggcgtatcaaaataatgcatactttcagcacttctgataattatatcagatatcttaggagtactatatactctaatagagtgtgcataacagaatttgagcaattcatttcgcacctgtgatggcaaatcacagataacgactccctgatactgcattatcttgtcctccagcaatgcaatattattatgaacttttatacattctcctatctcaaaacaatccgcacggctatttattttattcattaatgcagcaactggacgttctccatataccattatcacttttctaggcggatagagttttctatatatattggaagcaatgtagccccatagtgtagtaatcaaaaattggccgcccgtcaaaactactaacggaagtatagaacgaaaatgttttaccaatagtacaatgggtatataagataccgcgtttgcacaaatagtagctagtgtatgagtatatatcaattctgcatttcttaggtaacctaatctcaaactaccgtacatcgaactaaacacatatagaataacagcataaactgcagccaggaaatagtgtcccatgcgctgataaggcatttccatatgctcattatagcaatatatccatacatacataaacgcaactgactcaattgctattatgaatataccggcaaaaaaacgtattacacgcttatatttatcgtaatttttcactgatagttcctgccctttccgcataaataagtatagcagctaacctttgtatagtataacatctaatgaaatagaacgcaactcaatgcattattgcagttttatccaatttttttgtaggttaccaagatatttgacaaaaccgagacagaggaggaatgagtgggatatggcgggaagtgacggtatatcaagggtttcagcggtttttagaggaaaatcgctattgacaaataaaatgagaataatatagaaaaaggaccttttccaagaaaattgccggaaaggtcctttttttgagccgttaaaaattaacgttaatcaatgttataaaattatgtgaaaagtacgcaaaatcaatgattgacgcgttaataataatctgaaaatacttaaaaaaatgtaagtttttgaagatagagcaagtcgcaaatttggataatgctaaaaaacgtgcgacttgcccattttaaaagggatttagccattttgcttttataattgcaagtcgcaaattatggtttatttataggccaaaatataataaaaaaattaagctatttcgctatttccgtccatgacgttttttccatgattcgaggttgatgacaactccgatttttcacacttagcaacctttgcacgaagatagttttttacatcaacttgttcttctaagggaaggctcctcaacataaaaattatgagttcctcagattcatttaatttcagaccatattcaatattagatatttttggggagttactatctataattgatgcttccccagttaaaatccaatctatagaagtttgaagcaatttagataacgaaactagtgctttagaagatggtaaaacattaccgcgctctatttcgctaaggttaccattagatattccagtagcagcataaacatctttttgcgttagattaagttcttttctacgagttttaattcttatcccaaccattttatcaatattatccatttgacctcccattttgatacagattatctaatttaagataaaatctaaaaaagaatattgacaatatctaaaattagatatattatatctgtatggatgatttataagccaatacaaaagtaccacattttgaagattacttcaaggaaaagtacttgaatccacagcatatctacaatcaagtctgattgaataagcaacattctttgaaagccaggttcctggcctatgattataaaaggaaagaaccaccagccaaagctgatggttccctgtgccagatgttaaatggcactgaagtggtatgattccccatattgggaaacctcaccatggaggcggaacttgctttttggcttcggagcatctgcttcaaagtcagcagagcaggaaccatcctcactgacctaaccggaaacgaatttccagtcaatcgagttgccggaagcgaaggaaacaatacgggtcaacgaatcatttttcatttctggctgcctctttggcgagataaccatggggctcacctcccctgaaaggctgtatcgttatacctttcagtgccattttaacatatatcaggatgtaaagaaacaaaattatcatatcggaacaaccaaatctggttgaacaatgttcttacggattcaggttcctaaattcaagattggataacaaatcaaaaagaggtgaagagatgcagaaggaactattgtatttagaagaattatatctgtcagaaaaagaacttgttaaaaagtatacttcggatacacttccgaattctccaaagacagggtatgagaaggagtggagtcaggcatatgaaagagcagatatgattatgaaaatcatgaagctgattcagagggaaatgaaggcattatgtaaaacagataaatgtaggctggaatatataattgataagcttttgaatgaatcggcaactgcacatatatgtggaactgccgattcagcagaagtgacaatagtagatgggattgagagaaagattatagcaactcttaaggcaagaattgcacttggtgattgtcttcttattgatgaatttcacttttactaattgtcttgtagctgtaattacgattcggaagtatcgtgcaggatacctccagacggtaatggccctgattattagcaaggaaaacatcataagtagcaaagtaggttttttcatcttgtatggattgatgccccatacaaaaatcaagaactgcggaacgtggtgatatagaacgagcatatgactttataaattggctacaggggcagttcctttcaaagtcacgttctgagggatatgtgaatttcattttcataaccaactcctttcacgttgattatatcagtataaaggaaattagaaaagaggtggtaattctcatgaaaaatggcaaaaagccaaccttaagccagaaaaaggagatgaaacttcatggcctgcagccagagaactggctggtgataaaggataccagggagtttctggaagtggtaagcagaatggaacttaagcggattggaacaggcaggaaacggaccagaagattatacaggagtgagtaagatggcagatgtaaagacaagggagcttggaaagattgtcaagaagcgtctgattgaactggagatgacccaggtccagctggcaaatatattggggaccaccccccaagaattatgccggatgctgaagggaaagagacctgggtataagtatcgggagcaaatgctgaaaattctcaaaataaatgagaatgatgtggcatagggggctggatatggacttgcataaaagaagaacgccctacttctgggggaaggtcgggcgttccgataaatactcatctgcattgtactataccaacagccaaattgcaacagaaagggggaaatctgatggaagaaatttatatatccatgaaagatgcatctaaattggaagaagcagtgtataaaacattcttaaaacaggtttctcaaagagtaaaaaaagaggggttggttatcagaacagagaaatctgaaaagggaggccaagagcgaaaatacatcaaacttactgacctaagccccaaagcccagaaggcctaccgggccatgaagaagatagatacagaagaaggaagtgatatcgtgatggagaagctgtccccagaggagccctggtacctggataccgatgtgaactggtacatagggaaccacagccaggcatattacaaggcggtggagctgtcccggctcctgcaggacatcatcaactatcagggagaggacaagacggagtacatcatccggaaggcggcggagctgggaatgagccaaaggactttgtaccgccacatggacaaatacctggaggcagcagggtgggccttaaagatgttgcgggagaccggggccaaccacgattattacaaggtcctgtgcctgtgccgcaagcccaaggattccaacaccttccccacctttacgccggaagtgaagcagaagatacacaacatctggtttgacaaggactttgcccggaatgaaggaaagcgccagatgctgtatgacaagctgctggaaatcggtacggccaatggctggcccatcccatcttaccagagtgtatgccgttacatctcccacctgatggcagacgggcagctggaaagcgcccatttccttgcagccaaaggtgacagggagtggaagaacaagcggatggtgaaggccctgcgcgatacccggtccctccaggtcatggaggtccttctgggggatgaacatacctttgactgctgggtctcctatcagctgcctaatgggaaggtgacggccatcaagcctaagctggtggcctggattgacgccaggagccgcatggtgctgggggatatcatctgccgggatgccaatgcccagatactgaagcaatccctgattaaggtattgtacggaaccccgggagggatgccgaagtacctgaacattgacaacggaaaggactatacctccagggaactgaccggcgtcaaacgctatcctacccgggaagaaacagaacggtatgccggatttgaggaggtaaaagcgggattctatcacaccattgggatagaggacttccaccggagccgtccttatgagccatggagcaaatccgaaatagagcggctgtttaagacggtatgcgatggattctcccggtggtttaagagctacacgggtacactgacagggagcaggaccagcgccaagattgacaaggacatcaagcggatgcttgagcaggggaagctgctgaccatggaggaattttatgagaagtggagccactatctgcacaacgtgtatgcggtgaaggtccacaggggcctgaaaaaccagggagaaacatattgtaccccgcaggaactgtttgacaaaggggaacggtatgagaaggctctgccgccaaaatcctttgccctgctgcagctgatgaagtcagagcgggcacgggtatataacgtgggaatccggaaattcggccaggtctataaccatccggagctgatttattacatggacaagcaggtggacatcaagtatgacccagaggacgtaacccggctgcttgtgtttgacgcccaggacggccatatgatttgtgaggccgagagccaggaactgttaaagattgcccacaaggtcccgcaggaggcgctggaacgccacatccggctccagaagcagcagatgaaggatgtgcgtgagaagctgaaggaaatgagatgcccgctggatgaacggattgccggcgcggcccaagccaacaccatcgtgggaagcatgatgatagaaggggcagggaacagccagaaggtcatcacgctgccgaaggaggagagctaccgggaacacaggaaggcggcgcggcagtcggaatatatcgccaagcagggccgtgaggcgctggagaagctacgcaacatgggttaagtcccaacacataaaccaatcaaacggaaaggaagggtatcgtaaatgaaaagtctggcagaacgtgtgtgcctcagattaagaatcataaacatgaacaaggcggagctggcctggcagtttgataaggaagggatgaagtgctcccgctccatgctgagccagtacttaaacgggaaatatccaagcaggccagtaaagctggaggaacgtctggagaggtggctggaagagacagaggaacaggaagcagccttccggcaggaaaaaccgcaggtggcagataagtatgcccagcagattgcccgccagtttgcatcccgggaagaaccggaggaaacgggagtgcaggagcctctgctggaagaggaagcgccgccccggatgggaagcaagccggatgtgtttgaatccgatgattacatcaacatagtaggcatctgcaacctgtgccagcaacagcaaggaagcgccatcgttgtggggcggtccggctacggtaagacctacagcctgaagcagtacgccaggctgcccagggtcatctatattgagtgcaacgagtccatgagctgccgggacctggtaaggcggatagagaagcagctgtgcctgccaaagcgctacggcacgaatgacgaacgtctggaggaaatctgtgagtttttcaacgtgaaccggggatatctgatgatagtggacgaagcggacaagctcatcaacaagtacaccatcaagaagattgagctgctgcgcaccatcatggattcggccgcggtagggatggtactggccggagagctgtccctggaggcccacctggctgcgtatgatgaacggtttgccaaccgtatggactttgcgtaccggctccatggcctgggaaaaaccgaggtagagcgctacctggaggactggagcgtggaggaaagggccatggaggtgctgaccagccgggccaggaacagcaagaacggctgtttccggctgtttgaccggaccatgaacaacgtcatccgtctgatgcgggaacgggaacagacgaccatcacggaaacaatcatcaacgaggcatccgccatgatgctgctgtagggagggaatggacgatgaaacgtaagatactgaccatcacatacacatgcccggaggacaaggtgaacctgggggaggcggacatcatgggatatatcctccagcaacttgggaagctgggggcctatgatatcaacctgaaggccagttccgcggaggtgcgggaaccggctgcgccaaaggtcagggagacgggaccccaaatccctgcgttcctacaggaacgcaggagccggccatccaggagggaagtgctctgcctgccaggaggaggggaaacctatgggaacaggatataggtataccatcaagaccctgtgggggttagccaagtcaaaggagctggggctgacggaggaggagctgcacctgctggtagcccgtgagaccgggaaggacagcatccgtgaactgaaccggtcggagctgtcccatgtctgccatatcctgcagaaacagaaggacgatatcaaacggcaggaggggaggctgccggaacgcagggggaacccgcagaccggacggcagcgccgaaagataggccagctgaaagagaagctgggctgggaggagcggcaggtccgtgccttgtgccaccggatgtaccgggtggatgcagtggaatggctgacctattaccagtgccagggactgattgaggccatgaaggccatcctggagcggaagccggaaaaggaggatggccggggatgaaggataaggaaggtaaggggacgtttgggtctgtcatggcggggttcctatgtgcgcagttggaagccacggccatctacctggggcattcagctacacagcaacaaaaatccgattggatgaagctggaggtggaggcccttctccgtgaaagccagcttgccagggaggcggtccagctgaagcagaccctggagctgggggaacatgtgcgccgggaaatagagaaggagcagatgaagaaggatacgccggaagggatgctgagttgatggaaggactgatgcagctgtttgaccggaaataccgggaataccaggattatctggatgaaaagtcctgggcggatgcggcccttgcccagtcctacctcctgggggtcctgcattgcatgtgggccttatgggaccggaaggcggaggacgcaaagcaataccatgaggagatagtgcgacggagccataggatagaacagtaaagagaggagagcagagatgaaacggaccattaagttacatacaggagcggccaagaccgttgaggataccacgcataagataatgacaatccaggaatggagagaggaagggacaagacgttttggtgaggactacatggattggaagtttgagtgccccatgtgcggacatattgcatcaatcagggattttatggaggccggagccaaaggaccaaactgtgcctgtcaggagtgccttggaagatatacgggaaaggggtccccgaaggcgggagatgcgtctggctgcaactgggcggcttatggactctttggtatcccgaatgggaaggggatgattgtcctggatgaggaaggaatcgggacggagtgttttgcatttgcaggacaggaggtgtagttatgccagggaaacatacgaagctctttaaacgcatattccatggtgatttccgtccggctgacggaatggactattcccgcgcatataaacgctggatgaaggagaactatgaagcccaccagagattccggaaaacattaaaaaaaggccagctggaggcgtttgacgaattagaggaaatggatattgagctatcaggaagggcccaggaagagaactacatagccgggatgaaggcaggcatccagctcatggtggaagcgctccggtagatgaggcctggttttgaggaaaagggggaccggtatggcaggacgagcaacctatttcaggctgtatgaccatggcaagtacatgggggagtacagaaactctgagctcatggaactgctggatatccgtcatcatcagttgattgcctattatagtgacaccggcagggagtataaggcgcgttatctgattgaacggatagaggaacccatgcgtagaggttgggcagcggagtgggactgcgccaggctgagggccctgtgggacggaacccggctgaagattctggtaaaggggcgggagaaacagcaacaaagctggctgtggaaacacagatagcagccggtatgggaaccttgaaacggtaagatgggattatatgtaaattaacctacatttacgaagggagacatatgaaagatttaaaaagagcggtattgataactaccattttggtgtcaggattacttggcgggtgttcctcatgtagcaggatgggaaagtctattagtagtgacatgaagggagggcttaaccgcacggttacgctttatgattataatggcgaagaaattcggcattggtctggtaagtttgacgtttctgaaagtgaaaatgaggtgtactttgacgaccagaacggaaaacgtattattatccatgggggaattattgtcaatgaagaaaattaggattttccggttgagccggaggaagggataggcgtatggaggaaccatttgaccagaagatgctacactttgcagtggctttaagtgatgcatataaagaggatgatgaaaaagaggggcttgcgctggctccgctggaaatgaaaaaggatgagctgacggaagatttcacagcaatgatttatgcacaatggatgctgtacagaaaagttacaggagatgatattgacattttggggttcacccatgttgcaaaccggcttgtatttcaacaggtcctgaaagataatggtgtgctgtaaaactaacatatggtttagagaaaggaaggaaaaacagatgggaacgctactggatgcattttcaaaagaggaccgggtggagatcaccttttccgatttttaccggctcatgcgggaaagcacattcgcggaactgatgaaaaatgccgtgaactgcaacgtgccgcaccgctacataagggagatggtaacgggagtgccggaggagaccagcataaagccggatggtgaaggggggaaggaacatgtggatactgacacagaataaggagcggctgctgactacggaatccatggatgagatacgcgttgcaccgccagcgccaggcaggatggattacgtgctcttgcttaaccgtaagacggaccggaaggagcatgcattagggttttaccgcaggaaggagcgggcaaaagaggtgcttcaggatattttggagaaacagtcggagtatatctcctgcgagggagggacgagcctgattacgggacgtcatcagcctgcctttgtggccatccctcccaaaacctatgtcatgccgctggatgaataaggagggacgaagggatggagacaggaaagggaacatccgtgtataccgtgagcaaccacgcaaaggagcgttacgccgaacggtgcaaggaccgggacagccggctggagataaccacctacgtggcggagcacagccagcggatagaggaagaaatcaaccagatgctgcgttacgggaagcgtgtctatacgggccggacggagggtggaaaggaccgggtgcccaaggaagtgtatgtgaacggcctgtggatactgctggctaatgccgaaacccgcaacgtcatcaccctgtaccgggtggaccttggctgcgggccggacctggacaagctgtacgtggagcggatggtccagcgcctggaggaagcaaaaggacatctggatgaaacaagacgcaaggtggaggaacagaaccgtgcctaccaagccatcctgcaggagggagaagggcagatacaggaataccaggagcgcatccgtctgctgaaggagatgtgcgaagggtaccaggcagtcatgcgcagcagccgggccggcgtggcccgggccgcggacgaggtggaagcgattgtcaacacgttaataggaaaaaagaagttttaagggagggcctatggaaccaacacaagcccggatagagctggtccgggaggacgggaccatccggatgggtgggacggacgtgagcatggaggacatggcccggatgctgggggtgttcgccggcatcgtggcagcggaggcggtaaaacgcggcatgggtgtggaggaagtcaaggacgccatgctggatatctttctggcggccacggcccgtctggatgaggagcatgcccaggacatccgggagggacatacctgggatataggataagaaggaggaagcaatggaatacaaacgcattacaagcaagggcggggtcaacatccccgtgaagctcaggcggtccatggggattgagcccagggacgccattgagctggaggtcaatgacaggaacgagctggtcatccgggcctaccaggcccgctgcatctactgcggaagtgaggaaatccatcttaaaaaaaatggcaaaggggtctgccgtgcctgcgcagaccagctggtggatgaatacgtgaagcagaaacggaaggagcttgcatgatggatttgggaacggtaaacgataaggagctggtggacctggccgtggcggccatgaaggtggctgaggatgccaagtccgccctggaacaatacaaggcggaaatccagaaccggggactgtcggtcttaaaggaccggaataaccagtactgccgtatgtatgggacggacgggagctatgcggccgtgtcagagccgaaggagatagacattctcaacatgccccggttaaaacaggctatcggtgaggatgtgtgcacagggctggtgacggagaccacaaagactacctataccctggataaaaagctgcagaaggccctgaaggccattgccgccaacgattacacctttgagtatactttggaggattacctgaaggagatgagcgtaccggtgagcgcaggccagagggaggtgctggcccggagactgaagggggactacaaggaggataagaagacgctgttgtccgtcctggggtatctgggcaaggggaccacggaggaggccgcggaggccgccgcccccaacctggacatggacctgtactacatatcaaagattaaaaacgcggaactgatacaggccatcctgccggatgagggaatcgactggagcatggatgaaatcaagcggtccctgattgtgacatctaagctgaaactggaaattgcctatgaaagggaggacaaatgatgaaagcagacgaaaagagacaggccgtggccaggaagtatgacgagctcatcggaaggaaccattacagccagccgctgcgggactactgctaccggaaacacagagatgggaactattacagcgactgctccagctccatctgttacgcatacaaagaagccggatatggtttcggtatcctgaacacagccggcatctaccagtccgcgcggctggtgacggtggacgtccccatccgggacggccaggtgcaggacatcggccagctgcgggtaggtgacatgctggagtttgccgggacggacgagaaccggccgcagaccatcggacatgtggagatggtgcatacgctgaacgggaaggataccatcatctgcggacacggaagcggccgcccatcctataaggacatgatagcctattgccggcagcgccagaataccaaagcctccaccaaacgcgggaacaagggtttggtgtgtgtccgtcgctatctgctggatgacgtggccttggaggaaccggtcaggaaatcgggctggcaggaagaggacggcgtctggcggttttacctgggggatacgggacaatgtgttcgtaacgcctggtacctggatgtggacggccgctggtactggtttgacggggccggccgcatggtcagggacacctggtaccagtaccagggaagctggtactacctgggaaccgatggtgccatggtaaaggggcagcagaccatagacgggaaatggtatctgatggacggagccggagccatggtcacggagccggtcacactgactccggaccaggacggcgcacttaagtgggaaggcctggcggaataagaggaggggatatggatgcgcagggagctgatggaggagctggaagcggataccactctggaggatatcgcggagccgtaccgcctggtggtggaaatgataggtttgaagaacgtgctgaagctgtcccagtatttcatgggggacaagatatacctgcccaaggcggagcgcatcctggccccggcgcggaaccgccggatacggcgggagtacaacggaaggaacgccaaggagctggccaaggaatacgacctgaccaccaaccagatattacagattgtgcgggacctggacccaacccagatcagcctgtttgagttcctggatgaagaatccggaaaggcccaaaaaagataagttgtccaaaatgcttgggctaacaatatgtttccagatggattatcctatggacatgacgaaagtcatgtcctgttttttttgtcccaggacagacagaacgagcgaggaggaatgggaaatggagaacgtattacagaccttggcggggcagtatacccagcagctggccctcatgatggcggccattgcggtggcggcctttacggtcagcgtcatcacggaggtaaccaaggaaatcggctttttgggaaggatacccacggccgtgcaggtgattgtgctgtcggttgtcctctgtcagctggtctattggtggtatgtgaccagcacgaaggccgcggccgtgtggtggggcccggtcttggccctggtagtggctttttatgtggccttcctggccatgtacggctgggagaagctggcgcagctgtgggcaagatacaaacatccgggaggaagcgcatgaacgatgcagtcacaatcggcatggcagccactgcggtgggaacggtcctctggttcctggtaaaaatgatgattgatgacttcaagcagtccgtaagcggtgtcgggagcaagctggacagcaccattgccaggtttgacgagaggattaccaagctggaggacaagcaggaggcagacatcaaggcagtgcagaaggaactgagctccatcaagggggattttgccacgacctttgtgctgcgggaggatttttttcggagcatgaacggggtggaggacaagatgcggtccatggacggcaagctggaccggttactggtaagacagggaggcaaagcggatggatgatagggagctggctgaaatccagcacaacaaggcagtcaggggctatatcatacggtccctggtaaaaggatataacaacacggcgctgaccaggcagctgtccaactccatgatagcggcgggattaatcgtatccccggacatcaccaaatacctggactacctgagggacgctggatacattgagttcacgaacctgaaggtgaccgcctacaacgcatacgccaaggacgccgtgatacgactgaccaaggccggtgtggacctggcggagggcactatagaggacgcgggagtggatgtctgatgggaaggacgaggaagaagaaccgcatatcctccaagattgacgaactgccgtctgaaatcaaaggacaggtagacgtgatgctttccgatacatccaacagctaccaggacgtcagcggctggctgaaggaaaagggctatgaaatcagcaaaagcagcgtggggcggtatgcagtccggagcaatacggctgcacagcgcttactggaggctcagtcccggaccgaggccctggtaaacgtggtccggaagaacccggatgcggattataccgaggcgggcctgatgctgatgatggacggactgattaaccgcctggcaacagcggaggatgagtttgactacctgccgttagacaaggcaggccgtctgattgcatccttaagccggaccaaggcctataaagataaagtccgccaggacatgaaggataaggcggacctggcctttcaggaaatggaggaggaaatcatgaagaccatcaagtcagatccggagctgaaggtgagactgaaggaaatcctgacccgtgcaaaggagctgatgctgcatgattgatatcaacgaatacctggagcgcctggacgaagaggaaggccgggaggaacaggaacgggaagcctatcagcgggagctgtttgaggcgtatgtcctgcgccggacggatcatgagccggagcgccgggagctgatgcggatgtaccgggacgggcatcccctgacggggccgagagggctcaggaagcgcctggcggccattgacctgggatactttggccgggcctatttaaaacactactttgtccgcaaatccccggccttccatgaggagctggacgcggtctggaccggaggtgtgctgaaggggcgcaatccataccaggaagcggccgttatctcacggctggacggaagccggaacgtggtggcagccccgagaggccatgcaaagtccaccaactttacatttaaggattccctgcacgcggccctgtaccggtacaagcattacatcatcatcctgtccgattcgtccgaccaggccgaagggttcttaacggatattaagacagagctggaggaaaaccgggacatccaggaggacttcggccggcagcagggaaaggtgtggaaggggaatgtcatcctgacggcccaggacatcaagattgaggccatcggttccgggaagaagatacgaggccgccggcaccgggcctggaggccggacctgattgtcctggacgatgtggagaatgacgagaacgtcaacacggcggaacagcgccggaagttggaatcctggttcaagaaggcggtatccaaggccggggatacctatacggatatcatgtacatcggcacggtactccattacgattccctgctcagcggagtactgaagaatccagagtatgattcccgaacctatcaggccgtgctgtcctttgcaaagcgggaggacttgtgggagcgctggacagagatttataccaacctgtttgatgataagcataaagagcacgcccgggaattttacgaggcaaacgaggcagatatgctgacaggaacccaggtcctgtggccggagaagatggattattacaaactgatggtcatccgcgtttcagacggggaggcggcctttaacagcgaactgcagaacaaccccatcgacccggacaatgcggcttttaacccagagtggtttgattactacgaggaggagctggtggactttacggacagccgctacctctttgttggttctaatgacccgtccctggggaaaaacaaaaaggcggacacgtcctccatcatcaacttggccctggaccagtataccggatacatgtatgtggaggcggccagcgtggaacgcaggaagccggacgtcattatccaggacgtgtttgagatgaaccgcagactgaaacgggactatcacaggggcttttatcgttttggggtagagacggtgcagttccaatacttttttaaagaagttatggctcagctgtcggtggagctgggagagtatatccctattgaggaaatccagtccatcgccaacaagatgctccgcatccagtccctgcagccctacattaaaaacgggtatatcaagtttaaccggaagcataagacactgcttaagcagctggaggagttcccgatgggcagaaatgatgacgctccggacggacttcagatggccgtggccctggcggtagcggtgaagtccatggcgaagaagacagactataagtccgtgttaaggcgggccatgcggtttggggagggagcatactgatggcaaagaaaagcaagaagagattctcaccggaaatgacaaaaagcggcagacccatcatggcagccgttgccatccgtgacgtgaacgataaattcagcagctacccgtctgacggcctgacaccggtaaagctggcccggatattcaaggaggcggacgccggggaccccttccggcagatggagctgttcgaggagatggaaagcaaggacacccatctgttctcccagctgcagacccgcaaacttgcggtgacgggcctggactgggaggtacagcccttttcacaggatgaaacagaccaggagatagcggcttttgtggaggaacagctgaaggagctggacggattcagcgacaacctcatggacatcctggatgccatcggaaagggcatcagtttccaggaaattgagtgggaatacagggacggccacgtggtggtggaaaatattgagtacgtccaccagaaaaagttttattatgacaccctgaccgatgcgctcatgctccggacggaggcgttcccgggagggataccccttccggaaaacaagttcatcgtccaccggtacaaggcgcgttccggccacccttcccggtatggcgttctgcgggtggtggcctggatgtacctgtttaaaaactatgacctgaaggactgggtcagtttctgtgaggtctacgggatgcccctgcggcttggcacctatgacgcaacggccagtgaaaaggataaagcggccctgatggatgccattgtaaggatggggacggacgcggccgggattgtgccgtccgggaccgatatcaaattcattgaatcgaacaaacaatccagtgtggacatctatgaacggctggcccggttctgtgatgaacagatgagcaaggccattgtgggtcagacactgacatcggattccggcggttcctacgctcagtccaagacccataacgatgtgaggcaggacctgacggaggcggactgcaaggcggtaatggagacggtgcgccgggaccttatccgaccgctggtggagttcaacttcggcgtccaggctcatgtaccatatttcatactgaatgccaccgatacggatgacctgaaggaaaccgcggaaatcgtgaacaccctggcggccgccggtctggaaatccccaagagctggttgtacaagaaattcaacatcccggccccggaagacggggaggaaaccatcggaccgtccccggccgtctccgggatggcgggtacggggcagcctggcatgttccgggggctcaagctgaaggccgatggaaaggaagcagatggccagcaggtgttagaccgcctggaggcggcggctgtggagcagtccagtgcctttttccggcagatgatgtcaccggtcctggagctggtggagcactgcgacagcctggaaggcctgcaggagcagctgaaggacgaggaggccctgcggcagttatacaatgccatgaaggtgaaggattttgaccagctggtggagcaggtcatgtatgtatcaaacatgttggggcggatgcaggatggatgagcagatattaaaggaactgaaggaagggacggagccggaggtgttcggtgaagccttagcgttcctggaacagaagggggtcatccggtatgaggacttcaggaaactgaaggaagggtaccgccccctggcattttcggttgccggttatacggagcttgaggtcctgaaccagttcctggaggaactgaaaagggccatagaggaagggaccacgaaggcacgattccaggaaaacatggaccgtttcctggaggagaggggctatgacggcctgacgccttatcatgcggaccgtatcttccgccaaaacatgcttacagcctacagcgtaggccattaccagcagatgacggacccggatgtgatgggacggcggaggtactggcagtaccagacggccggggacaggcatgtgagggaaagccacgcggccatggacggccgggtatttccagcggattccccggtgtgggatatctggtatccgcccaacggattcggctgccggtgtatggttgtctccaggacggaggagcaggtaaggcgtatggggcttaccgtagagcagaccctgccggatacgtccaatccggccacaggagagacggaggcgctgctgccggacccgaagttccggacgaacccggcgaaggcggagtggaagccggacctggctgcgttcccaccggtcttaaggaagctgtaccaggaacagcagaatgcgcgtaaggccaatccggaccgtccggcggggaattccagccccggataaatttaacgcgtcaaaacgcgtcaatggcgcgttaaaacgcaaaacagaaaggcgcatgggatgaagaagacagaattaacggtccggcccctgtcgggaatcgacctgagcggggtgccggaggtcatccgggtgctgcccaaagggcatgtgagcagcacaaagggagactttgaggtggatgaccgggatattgccggaatcatccggcagttcaaggcacgccggctggacctagtgattgattatgagcaccagaccctgagtgacgtgcaggccccggcggccggctggataaaggacctgtatccgggtgaggatgccctgatggcccgggtggagtggacccaaaaggggcgggagtatatcgccaacaaggaataccgctacctgtccccggtggtactggttaaaaaggcagaccagcacgcggcggtgttccacagcgcggcgctgaccaataccccggccatcaccggtatgtttgcaatcataaattccgatgtgttaagcatcgaagaggaagaggaggaaccaaaaatggaattaagtgaactgattcaactcctgggactggaggaagaaacgacagaagaggacgtcctgaagcggattaaggaactggtacagcagacaggcggggaaggacaggatggtccggaaggaaagagcgggaaggaggaccctgcaaaggaagggacacagctggtagccaacaagaccgttctggacctgttaggccttccggaaaatgcaaggacggaggacgtgacggcaagaatcatggcattcaaggccggtgattctgtactgcagcagcgggtggcggagcttgaaaagcaggcggccagccaaaaggcggaggaactggtaggactggccctcaaggatgggaagctgtccccggcccagaaggaatgggcggttgcgtacgccctgtccgaccccaagggctttgccgcatttgtggagaaggccccggtggtggtccctatgggaaagactgcctttgcggtggatgaacggaaacagaccggggttgactggaagattttaaagaaccagggagtgaccgaggaggatttaaagaagtatggaggtatggaagatgatacggacggggaatgagaagctagaccctaagacactggtgctgccggtggcagccggcgcagccattacggaggctaccatggtggcccttggggcggacggctacgcggtgccggcctcgaaggcggcgaaccttacggtggccggagtggccctggagccggcggataaccggaccggggaggccggggacatctgggtaaaggtgcgccgcggggcattcgtgatggaaaattccgccaccccggggagccaggcaaaggcaacggatatcttaaagacctgttatctggaggatgcggtcaccatcagcatgacctctacaggaagcagcccagccggaaccgtgctggcggtagaagcggacggggtgacggtgtggttcaaccagccggccatgccggctgcggagtaagcgagcataagaatgaggaggaaacagccatgattattaaccaggcgaacatccggagcatgtccatcggatacagcgtcattttcaacaaggccctggcggaaacgccaacgacctaccagcagatagcaaccaccgtacccagtaccacccgggaccagtcttataactggctggggcagatgccgcagatgcgggaatggattggggaccgtgaaatccagaacctgagcgcctatgattatgtcatcaagaacaagaagttcgagatgaccattgcggtcccacgggatgacattgaggatgatacctacggcgtatataacccgatgttccagaatcttggtgagtgtgcagcgcgtcatccgaatgaacagtgctacggagcactcatggccgggtttaaaaatgcgtgttatgacggcaagccctttttcagtgcggaccacccggtagaaaagaaaaaggtatccaacctgggcaccaagaagttatccatggaggcctacaaggcgggacgtactgccatcatgagcctggtgggggacaagggcaagagcctgggcctggtgccggacctgttagtggtatccccggccaatgaggagatgggacggcagatactggaagcggagtttataaacggaagctccaacgtgtacaaagggacagcaaaacttctggtggagccggaactggcctcgcaggaggacgcatggtatctcctgtgcaccaggaggtccttgaaacccatcatctaccaggaacgcaagaagataaagctggtcagcaagacggcggataatgatgacaatgtattcatgcgggacgaattcctgtacggcgcggacggccgcaataacgtaggctacggtttctggcagatggcttatggcagcacaggggaatcaagctaagggaaggagacagacatggcatactgtgaagcgggggacgtcatggacatgctgaaggaggatgccatgaaccctattattggtgaccggtacattgaggacccccaaaaacgccgggagatgctggagcccctggcccgtgaggccatcggggatgcggatgcggagatagacgggtacctgatgaagcggtacccggtccccatgtcccccgtgccggcggtcatccggaagtactcaaaggacatcgcggtctataacctgatttcccgggcgggaatcgacgaaggggaacgggagaacaactacctgacgcggtataagaacgccattgcgttcttaacaaaggtggcaaaaggtgaaaccgacatcgtgaaggaagggacggacccatcgaaggcggcagcggagggatttcgcatttcatccagcccgaggctgttttccagggcaaccatgaggggactttaagatgcgaatgaccacaaccctgtccggggattttccggagcttcagaaaaagctggcgggcttgtcgggcataaaccggtccgcactgatgaaggacgtggcggaggggctgcggtccaccaccatggaccggttccggagcaggaaaagcccggaggggaagccctggcctgtctccctgcgggaacaggagggacagggcatcacgctgacccagaccacccgcctgaagcagtccatccgggccatcgcggattccaccggagcggcggtggggaccaatactatttacgcggccacgcaccagtacggggatgagaggaccatccgggccaagaaggcaaagtacctgaggttccggtacaagggtgtatgggtcgcggcaaagagggtgaccgtccatatccctgcaaggccatttttagggatttcagatgaggacctgaaggacatacgcagcgaagtggaatacgcagtcaggagggcctgatgagacgggaaaaggaatacctgaaggaatgccttgaaaaggcaggaattaaaaatgaagtgattaccacctggaaacggctgcagctgaagacagacagccatgtgggagcggtgctgcgggaaggccagaccatcacgcgagacggctcaaaacgcaactatgaagaccaaaacggggttcggtgcgtgcggaccaaggtctatgccgtggacacccgcttcaaggtggttatcggggaatattcggaggaggcctgcgaggccatcttcctggcgttcctggagttgctgggaaaaggaatccgcctggatggaaactatgtggacattgaactgggagaggtggagtgggtcgataaggaggacagcatcctaaaggccaacatcgcatgccagataccggtcaccttccacggaggtatttaccgggatgacaaaaagaaaacggcatcggtcggaggaatccggccggcctgagaaagggaaaggaaaaggcaatggcaaaggaagagaaggggacgggcgcagggactgcagcagaaccggctgtgcctgtctatgaaaccatagaacactggtacaacgtgcatggcacgggtccggctgtctacgccggcaccttgtgcctgaagggctggaggccggggaaacaggtaacggaacaggaatacctggccgccgtcaccgcatttgagaagggccccatggccggaacgggaggaacaagatgagcttaagggacgtaacatttgtggtggaggacgggagtctgggcaattccggcagcactggaaccggggtccacgtaaagattggggcttccccggtggagacaacagttcccatcctgattaccgggagcatgaagccggagcagatgaaggaaaagctggggctcagccccctggcagacgcctgtattgacagcgtcgagaacggggcatcccggatttactgcgtgccggtcaggccggagaccgttggtaccaacggggaagttacccacagcgggactggggaagggaccgtaagcgtaagcgggacaccgaacaatgcatatgatatcatccttaagataacggaggacggcccgctcaatacggcagccttctgctgctccgttaatggcggatacagctacgatgcggaggaaaccataccgttaggaggaaagaaggagcttaccgggaccggaatcacccttacgtttgcggaagaatttaaggcgggtgatacctaccggttttcgaccacggccccggctgtgagcaacagtgcggtccttaaggcggtggaaagcctgtataacagcgatttggactttgagttcatccatgtggttgggacatctgcgaaagcactttgggcctctctggccgccagtgcagagctgttcctgtccctgtacaaacgccctgtgtttttcctgtgtgaggcacgtaataaaggggcggaggaaagcttggatgaatatgccgccgcgctgaaggcggaggccaaggggatagacagttattacgtccaggtgtgcagcgcctggtcccagtacacacgatgggatggccgggagcagtgcatcaacaacgccgggattgtggcgggactgtacgggatagccggtgtggcccagtccatcggccgcgtggataccttttccatctcggaggccaagatgacccggctgatgccggagggcattgaggactatatcagcgagctggatgacgccggctatctgacttggcgtaagtactacggcattgacggatgctatgtaaacaacgcgcgcgtgctgtgccgcgagggcagcgattaccggtatgcggagcatgtgcgcgtactgaacaagatgatacgggaaatctacaagcaggctgtcaacatggtgcagatggatatcagcgcctccgatgacatggagacggatatcaacaacatcctggagaccctgaacatccccctggaggacatggcggaggccggggaactgtcaagcggctccgtgtccattgaggacctggagcacgtgaacatcctgcaggatgagcgcctggacctggtgatatcctttgttccgagggggtatgtccgggaattccggttcagcctggccatggagaacccgtacaggaattaggagggactgggaaatggtcaacggaaaggtatacagctgggaggacatcaccattaatgtcccggggctggaggaaatcgctatcacggagatatcctatgactttgagcaggaggcggagctcatttaccgcagcggcggagccccatgcggctatgggaccggaaacaagaaaaacacagtgaaggtggtcatggggcgtgaggattacaacgtgctgttagcctggtgcaaacggaagggaaagaccctgtcccgtctgcttctggataagataaccgtatcctatgccaatgaggaccaggacacggtgacggatgtcttaaacaaggtaatccttaacaagcacagcttttccgcgaaacagggggataaggagaacacggtatccctggacggctttgcctgccgcggcgggaagttaaacggtgtgaatttctaagaaaggggagaaagaaatggaaacaaaggaactgagagagcagttaaaggggacggatgagaagtattacgaggtgaccgtcaccctccaggtggatgatgagacagaggaggataagacctactttttccgtaaaccgaaaactccatcctacgatcggtatttaaagacggtccaaacctcaaacagcaaggccctgacagcattctgcctggacaacattcatccggaccagcgggagacgctggaggcagactttaaggagtacccggccatggcattgtcggttggcgagaagctgctggccatgcttggcctgtcaaaggcgaccgcagtaaaaaagttatagaggatgcgcagggggaactggaggcggacttcgtggggaccagccggctgctcatccatatgtacctgccttccggcatgataccgggagaactggacgggatggacgcggatgacttcatccgtctggcgggcctggccaggtgcgcacgccgctggcggcaggatgacctggaacagggattcacccgggcactgggaaacctgttcccggaataaaaaagccccggtcatagaaagaccgggggcttgcctgtcagcctggagcggtaaaaacgccatgcgttgtggaaatcccgtcccatggagaagggccgcctgtccttggggagatgggtacaggcccaccacagatagggaccacagaacaggagatatgcggtgacaaggacggccatgaccacaaggtacagtgacaggctgacggccagtatgagtgccattatgagccagagcccatggaacatacaagcgcctcctttccaaacacatctttataccatcatcataacataagcgagcccgtgacacaaggaggaacgaaccatggggatggaatctgtttataagctgagcgtggtactgaacatggtggaccagctgaccgcccccatggggagggcgtcccagaacctgggttcccgcctgtcgggcctgcagtccggttttgggatggcggccctggccggaggtgggatgacggcggcgggcgtgggaatcacaaacgggatgatgaagattgccggttccaccttcgagacccaggatgccctggcagagcttaagtcgctgggaatcacagacctgaaagcggtggaggatgcggccagacagttttcagacacctgggccgggaccacaaaggctgatttcatcacagctgcctatgacatcaaatcgggcatcgcgtccctgacggacgaaggggtggcgcagttcacggagctggccggcctgacggccaaggccaccaagtccacgaccggggagatgacctccctgtttgcgaccgggtatggcatttataaagggtattactcagaactgtcagacctggaattcggggagatgtttgcgggcggtattgcgaccgccgtcaaggcgtataagaccagcggctcggagatggcctcggccatcagcgccctgggagggaccgccacatcggccaatgtgccgttggaggagcagctgtccgtgctgggcatgctgcaggccaccatgtcgggcagcgaggcagccaccaaatataaggcgttattaaatgccgccaccggggcgggtgagaagctgggactcaacttcctggatgccaacaaccaactgcggagcttgccggaaatcctgggaatcctgaaaggtaagtacggcgataccatcgacgcggtggagaagaaacagataaaagaggcctttggctcggacgaggcggtggccgttatcgacctcctgtacgggaagacaggagagctgcagacgggcatcctggatatgtatgatgcgctgggcggaggaagcagcgctgcccaggagatggcaacggctatcaacgcaacggaatcccagaagtacacggtgttaaagcagcagttacacaacgtgacggaggagcttggggtgaatctgctgcccactgtgaatgactggattgggaaggcggggcaggccgtggggaaggcgtccgaatggattgcggagaaccaggggcttgcaaccggcatcctaaatgcggtcctgttcctcggaatgttcctgaccgtgacggggagtgtgacctctatcatcggcatcttcgggacggcgataacacggaccattggcatggtgggcggcttaaaaagcggctttgagaccctgcggatttacgggatgtacgccgcggatggaatcaaggccatgggggccggcctgctcaacatggtccggcaggggattgcttcggcagctgcggcccttccgggcctgatatccagtgtgtggggcttcacaacggccctgttagccaatccggtgacctggattgtcatcgggattgcggccctgacggccgggcttattctgctctggaagaactgggataaggtatccgccttcatccagaacgtctggaatgcctgtgtggagaaagtacgggcgggcctgcaggccatgaaggacttcttcttcaacattggaggcgcgattgtctccacggtatccaatgtgtttaaccgggtccgcggggctgtcagaagccgaatggaggcggtccggaatgtaatgggcaacgtgatgggagctgctgtcgggactgtcaaacagaagctggataacatgaaaaatgcctatgagcagaatggcggaggtatacgtgggattgcagcggctgctgtagaaggtgtcaagggctactatacggcaggttttgatttcctgaatacattgacgggaggaaagctgaacggcattaaggagctgtggagccagggcctggcaaaggtccgtggtgtggtggatggggctgtaggtctgttcaaacagtctggtgtcaagataatggagacctttaccgaaggaatccgttccgccgtgaacaagccggtggaggcggtgaagggggctctgtccagaatccggcagatgctgcccttttccgatgcgaaggagggacccctgtcccagcttaccctgtccggccggcgtgtgtttgagaccatccataccggcatgagccagacggcttccctgccggcggatacggcgagggacgcattccaggcactgagggatgaaaaccaggaaggaggcgcggcttttgccaggctgttgaccggagggaaggaagaaaggaaaccgtccggccagggaaacatatggagccagaggcagcagggaggcgggaccgtcatccaacgcctggagctgcatgtgtccctggaacggctgaaggacctgccgctcttattcaagctgattgacgacatcaaggaaaagaccaacgggaacgtatcggtcacgcctgcatagaaagcggctgggaggaaggaagaatgctgtacataaaggatacatccatgctggtggcgggggtggccgtcccgggcctcgtaaagaagctggagataaccggggccgccgtgattgacgcggtgacggatgacaacaacgtgaccctgggttaccagcctaatgggtacgaaccactgaagatgaatgtggacctactgctggaacccagtgccggggaaagtgttgagagtatggtgcagaccatccagctactgtttaagccgccagggcagacgaccgccataccgctgccggtggtgaacagccaggccgcggcctgcggtctgagcatggtgtattttaaaggaatcgacctgtccaagaagacagagaacagttatggggaggcagcactggaattttgggagtacctgccggttaccgtgcagacccaggcggcggggagcagtaaaacctcatcctccggcagcaaggcagggatgtcacaagcccagggaatcagtagcgactaccaggaatatctgaacacacagagaggtcaggcccccaggattaaggataagacatcggagagcccggcccgggatacataggaggcagcatggcagaacggaaactgattacaccacggttccggataaccgttggggaccaggtattcacgcagggaatccgtgtggaatgtcattccagccggagggagcagtgcagctgggccaccttggaatatgaccccggttatgccgggctcttggaccttgcatccatggccccggctcaggtggaactgggctatgatggggattatgacacgctcttaaccggatacatggaggacggccaggcattggggccttaccggatactggacgatacactgttcctgaaacggacctacgtaaaggagaccttcctggactgctgtccgcaggatatcatccggttcggccttggaagggccgggattgcggattaccgcctgtccgataccatgtactccaaaaaggatgtggtcccggtcccgcgcatgaatgtggcggagcttatccaggaggtgggccgggtctggggcctggaggcatccttttatttccggtccggccggtttttctgggggaccggggaagagcagacgcttatctatgtactggaggaagggaagaacatcctttccttcaaccaatggaacggcggtaacgaaatcaagaccatcggggtcccgtggattcaccagggagagcgtatccggataagacaccggaagtttgacggggaggcccttgtgacctcggtccgggtgaaggcggatgaaacgggaagcgtgaggatgtatgtatcattttagttggaaggaaggggattcaaaatggccggttttcttgacgaatttgtcaaactgacggtgaatgagaccatagggacagactatccgcatatacgccatccggccctgtgccaggcaaaggtgatggaagggaccgtgaaggatggggcatcgtatgtgacgctgcggttgctgaaggaaaacggggagacggatgaagcctttcccgcgattccttatataaggacggagcaggtcctgaagaaaggggatgtagtggcagtcgggcttttatatgggcagtgccggccgtacatcctggggagatgcttatgatactgacggcaacggacctgatgttagacgatgccgggcagccggtccccctggcatcgggagaggaagcactggcgggcggcctggactgtttcctgcaggacatccgcctggaggccctgaccatggagggggaatgtttttttgattccgattacggatggtcgctgttggatttctgccaccgggagataggcgaactggaggagctgcagataaagaaccgggtcacggaaaagttaaagaaacgggaggaaatcaacccgcacagcattgaggttggcgtgtcccggatggaggatgacatagtgaacatccatgtgggatttaagattgcaaatgaggatgtgtcctaccagatgaatctggaactggacggggcggaggtgaaactcgttgattgatgaaagcattctggatgaaatcataccggtaccggatgccgatgcaaagatgcaggagctgaaggaggagctggcggcggaagggtttaccatcaccaagtggggcagtggcggcgtcttttactggctgacacgtatctgcgtgcagatacacatcgagctgctccggctggcgcggaccatcctgaataatcagttcctgaggcatgcggaaggcaggtggctggaactgaaggccgcggacttttccaagtttcgaaaggcggcgacccggacccagggatatgtgacacttatccggtctgattacgggcaggccctgatcataacgaaggggcacatgtttaagacggccccggacatcaatggggatgagctggtctactacgcgttagaggatacagtgatacaggcgggccaggcggagggcagcgtgctggtggaggcggaagcggccggagcgcgctacaatgtgagtgaggaccagataagggtaagcatgttatatatggagggcgtgtcgcaggtcacgaaccggcagggatggatatattccgagggggcagatgaagagagcgaagccggcttacgcagccggaccctgtccagctgggaggaactgtccaccaataccacatcggccaagctgaaggcagccgtggaggccatcccgggtgtgatgtgcgcctacattgatgaccagcatccaagggggcagggaacggtggatgtgattgtggtggggacggcgggggaagccagcgaggagctggtgcgcaaggcccaggcggcggcggaccagctgaaggataattacgaggactacctggcaaagtccggaaccatcacctatcaggatgtggacatcaccctgtacctcaaacagggggcaggggtgacggatgtggaggaaacggcccggtccctgatagcaggggccatgtctctttccaaccggacggacttcaacttattcttacaggatgacatccggtatgtgctccgccagagcataccggactaccgtaagaccgtattcacggcccccgcagtggacgtggagctgacggccgggaatgtggtcatgctggggagtatcacggtcaaggtaaggaacacataggagggacgccatgctggagacattcggggaatatatgtattatctgctgtccacgcccttcaaacaggcaaggaaggccaggaaccagtggtatatctatttcaaagtgaccgggcggctgttcgatgaaaacaagaccatgctccggcgggcacgggaggaaggcatggtaaggacagccagcccacggatgcttccggagcatggcctggaccggaaactgacgcgctacgagggcgagacctgggaaaacttccgggtacggctgatgatgtatgcagacacctgccggcttggcgggacggaggtgggcacgctccaggcggtgcggtccctgggatttaccgatgtggagatggtgccggcgtatgaactggagggcagccgggagcactgggcggaattttatgtcatcctgtcccgggatatagatgactcctttgacatcggccatgatatcatccgccgggaggtgcggcgggtaaagaaggtaagcggactggatcgttaccgtttcctgtaccggattcaggatgcaagactggaagaatgcatccgccctcataacatcctgatacgggcggaggtacgctggtacaacaataacatcctgaacggggagcacaacaacgatggaagcatccatcatgacaatgtgattggaaaccacctgccctatctgcgcatacgcagccggatggaggagagggaggagggaaggctgacatgtacaacctggcatcactggagaatccatgatgggagcacgtacaatgatggagccaaacatatggatgcacaagtcatagaggaggaaatctgatggcaagtacaaccacgataaccaagttgagtaagaacaagatactgaaggctagggcgggcatcaaggcattgccggcagtcacacagatggcatttgggaacggtgcggatggtacgccgtcagagaatgacaacaccttgaaaaacgagctgttacggaaagacctgagcagcatcgagcaggtgacggacaccaacttccggtatatctgtaccttatccagggaggagctggccaacacggccatcaatgagatggcgttgtgtgatgcggagggtgacctggtgatgatacgcacctgttcggacaagaacaaggatgatgacgaagagatgacctttgcgtttgatgatatcttttaggaggcagagaagatggcgaattttgagatagatgaagaccaggcggcgctcatccgggagttgaggaagctggaaacctcagacccggtccacgcaaatgtatacaatgccctattcgagaaactgattaacaatgatgcattcttggagcggctggcaaacaagatgatagaaaaaagcatgttgtgccatgtgttggacagcgtcaacgcgcagcaggtcctggcagcggatgtgggacctaaaatcacggcgataacaaacgagctgaaagagaatgttagtgtgctcaatactaagattatttatgttgatacaccgtcagtccccataacggcatctgccgggcaaagctggtttgctgatattccatttacaaaacaggacggatacattccaatctcagcaactataaattgtacgggcgggaattcccaggcatacataattggcattcaccagttgacaaatggttctgtccgggtggcatttcaaaattatagcggttctccgcaaaccatcaacatatccgctaaagtcgttttaatcaagcagacttaaggactgatggtaaatgtgactctcaacgcagtgttggcatatgcgttgcttaattccaatgcaattccgatacaataatcattttgacgttcaaacgatattacatttttagtgacatcataatatgcactggagcctgttagacacgcctgtacattatccacggtgatagcactcccttccttaacgcatatggggatgataccaacgacattattttggtatgtgtagtgcgccgttacgtaattgtatatatattgcccgttcgcagcatacacgctcttagtattgcgcacagtaaagcagtctggcagattgagccctcttcttttacaatataggtattcaaatattgtaagaaggaggcaactttatggatgaagtaagactgaaagacgaactgatggcgcgattgtccaacgaactggaccgaccagcgttacaggtgattgacggggcattatcatcggtgctccgaaactatgaggtatctaaacgagagacgaggctaagcaccaacataatcagcttcccggaattggatatctttattggaaaaatgcgctttgaaaattattcagcgagtacggtcaaccaatatcagcggttcctgacggacctcttaatctatgtagggaagccagtgcaggagatacaagactcagatattgtggaatgtctgaattactatgagcagatacgccagattagtgccagcaccaaggaccataagaggcgcattgccagttcctttttcgcttttctccatgatagaggatatattggaaagaatccaatggcgacagtagacccaattaagtacgttgcggaggtccgagaggcactgagtacccgagaaatggagaagatgcgcattgcctgtgggactaacattcgtgataatgctgtgctagagttgtttttggcaacaggatgccgcgtcagtgaggtggtggggatgcgcgttcaggatattgattttgtggctggatgcgttaaggtattaggtaagggacaaaaagagcggattgtatttttctcagagcgagccctggaatacttagagcagtacctgggtgaccgaaaaacaggtgcagttatactttccagccgggctcctcaccagggactaaaaaagaacgcacttgaaaatataatccgtaatattacggtgcgagcaggcttaagcaagcgtgtatttccccatcttttaaggcacacgtttgcgacccgcgctcttaataaagggatgccacttcctacattgtgtgatttgatgggacatgccagcgtagagactacacgtatttatgctaaaaatagtggcacaaagatgaaatatgagtatgatatgtatgctgctggatagcaactaagacaagataggattttttgaagcctgcttgttgggaggcttgttttctatacccttgtccaactgttgagcacagtaacaattgtttgttattgttatgcgtgctgtttttgaagccttccgggcattatactaagattacagattttgatagccgaatacatattgacgataccactaccattgcaaatcttagcgctcagataaagacaggattccagtgtgtctatctgaaaagcgctaatttaaagcccaactatgggcatggtgtgattttagagctaaataatgcatcgggactatatgcgataagaataatatcctgggatgatgatacacccaatataggaatgtattatggcattaaactgagtccctccacgttaatcaaggatgtaagttactttagcctacaagtcaatcgttagtttatccttgatatttggtcagtgatacatacgcagcgtaaccattggggtccgtgactatgagcttagggttttgattatcccatctatattctagtctttggatggagacgctaagcttatcattacaattagtccacgctccccacaccccctcagttttagcacgtgtgtatacagtacctctattggtaattgcatatattacaatccagtcattactcactgttttatgtatctcaacatagccgtcttgcgcatctggagcacctgaggctgtgccgttagttatttcatagcgtctacgcaaaaatgtattaagtggtgcattgtctgcaaaagttgctatatccccgttaatggcattggtacgcgacatatttattaaattagtattgaacacagtaataaaaatgcagaaaaataagttttgcctgaatttttatactgctgggcgcaatactaataaagctccgcttaatgaatttgtttggctgagggatgcctttaatggaagatataacactacccacatcactgatgctaacgccgctacaacatcagggttttatcggtatttttccaatgctgctaatacaccatggacgggtggcgggataatttttgtattagcttttgatggcggaagtggtatcgcgcaaataaccttttttaatggctcaccagcggcggcatcaattagggctagatataataattcttggactggatggaaagcattgtaatcattggcatccggaggtccatttacaataattgatgtatcttgataaccattatctaccgtagacatatattgaggtgcttcctgcgctactactttgcattcttataagtccgtcattgtaatggagtaaagcccatccattatataatgatgcacctgcaaatctgggattagtgattgaattgtctgggccgtgtttaatcgtctcaagcggcaaaagaaatggtatcattttgctgttatcatcatctataaatgcacatacatatatttcgctgtatttattaggcgcaaatgttacgtcattaaatgaatttccaatatattcccactgcttctctgctttcttagtattgcgcagtataacatatcaaattatggtactcaaaaactttaaaaatttttatatttattcaaggaggacgatattatgtcaaaagaaacaaaaaagggaccagattttgaaaaaaaacaacctactccgtatctgcatgatgccccggtaaatgtgccgcatccgggtaaacatcagagtggtgtgggcgggccatcagattgtaacaataacgggatagatgattcaaaagaaggagaaagaaagtaatgtcaaaattagttactacaacagggatatccataccggtttttaatgtggtaagatatccaactgttccagcattagagatacaaattttagaatcacaggttcaggaaattgacctgttgaaacttttcaagacagagagtgagctttctacatttacgttaatgtcagaccaggaaatcctcgaaaatcagtacatgaattattctaagttggatacatataacattcagaatgattatattgttaaagaagctatagagggccagtcagctattgtagatgaagaaggccataccgtttcagaagaagtaacggcagcgccagccataattgataatcttattacaataaggttgttaaaaaaaagtgatttggaatgcaaggtagataataacgggcagttgattgatgccatgtcggtagcacttgctcaaataatgggaggttgactttatggaaacatggaagaaagtaatatttgttaattcgataaaagtaagacttcaaaatggagagggaagtgcggaagagataattaactcctatgcaaaattgacggatagcgagaaggaaattcttaaagcagaattcttaaaataagtgacaaaaatgggggcttgaagagaactatttcaggctcctattttcccaaaatattttgccaaaaatgttgagaatttttgccaaaaatgttgagcgcgcacatttttattagtcttacatttcacaaaataaaaaatccctttctgaaacaaatatgaaatcagaaaagaatttttcataaaaaatcactcattctctcgtccggcagaaaggcccaccatgattagagtcatcatgattggggccaccataggtacgctgatatttacaaacgcttgtgcactataacatagaacagcaatagggacagccatcattatcggattattctttgctgtacgaactatacgcatcaatgccgtgcacagcaaacctaaatatgcagtcagaccaacaatccctatagtaatcaaatattgtatatattcattatgtgcactatcatatttttcactatatttactcaccatatcttcatagtaagtgtttacagttataattccaaaggtatctggtccataaccaaaaagcttatgcaacaccggaaatccctcataaatctccatagaaattctccagacataccctctgcgagtcccccagtcatcactaaacacaatataattccttaaagaaccatacttgtcaacattccccaatatattcgcatcatatagaatgtaacagccgcccagaaatattacaaacagaactcccaaccatatccacctgccaatattgttatcaagcactcgtctgtcaattagaagtttatattctaagatggatattgcaaccactgctccccataacacagcaactatgataggcaacttactgtatccagcaatcagattaaacagtccattaatttccattacatgcccaggtattttgcaaccaatataattgatgcacataaattctgtacttaacgtcgcaagaataataacataatttttaagtccgtgcacattattaaaaagatacaatggcaaaatacctaccaaagcaatcatagccagatatgcgttatcacttattccagtaattaaagcaaatatagataccaccattaccaaagcataccataacttcttaattcgattcctttctacgcagaacaaaagaacgctgctacctacaatcaatgatacataggatgtgtacgtatttatattccctatggttgacacaaaaattttataatcctcagggcttaaatctaatttaaaaccaattggatccaactcaaaatagtgcataataccgataaaacacactactataccagctgctaataaaacatccaaataccaagacttgtattcaagaaatttagtaatgataaaaaaactcacagcatacaatagaatcaaaaataggccggtcagtcttccttcgttgccccagaaggactcaaaacgatattccgattgcaacgtagaaataccggcagcgatcagaaagaatatcatagcccaatctgttgctttcaatgactttattgtaaaaccattaagaacagccttcacagtactatagttgttctccaccccatccttatgaataaatacaagtgtaatgattaatattgctaatgttatagaaattaccgaaccacaatacagccaatattttatctttaaaatatcatagtaataattgtgaaacactaatggcaacccaacgaacaccatcagtaccaaaatcattgctgcctttgcatttgtatttttccaggccacaagcaaattctggttttcctttccagtactctgttctttttccatatatttttttctctttcttttaattctaatattttaaatagtatatcattttaatcaccatttatcaactttatgaatatcgaatgatactatattcaaagccccctcatctctcttcatcctaaaatcacattataaagcggcaaaccttgctataattttccttatccgaagtataatcaactcgtaatgcaaaaaaggaatttcaaaaagtatttcaaaaagaaaaaggagagtgcattaattatgagaaagcagacaaagttagttgctgtattatcaacagcagcactgctcgctattggtgcatccatgacttctttcgcagctacaggatgggctgaggaagacggtacttgggtatattacaacagagacggcgagagagcaaccgatcagtggaagaaatccggtaacaactggtattatttagatagcgatggagaaatggctattgatcagctgattgaggacggcgataattactattatgtagacattaatggtgttatggcagctaaccagtgggtagctatcgacaacgaggatgctggacaggatgatgagccagaccattattggtattatttccaggctaatggaaaggcattaactaatggcaataacgaaaaggtttccttaaagaccgtcaatggtaagaagtatgcttttgatgatgaaggaaaaatgttatttggttgggttgatggtgataccgcagagcgtgtagacgataccgatggagaagctttcgtagatgctgattactattttggcggcgaagacgatggtgctatgactgttggttggttacagcttgatatcacttatactgatgttgataatagcgtatataatgctattgcacctgtatttacagatgatgaagatcagacccgttggttttacttcaaatctaatggtaaaaaagtgaaatctgatggtgctgaagaggttaaggaaaagactatcaatggtaagaagtacggctttgatcagtacggcgcaatggtagctgagtggtctgccgatgttaagagagcttctgataatcatgttgatattgttgccagcaagagtgattctgcaaataagaaatctgtttctgccaagtatgctcagcagtggagatattttaatgatgtagaaaacggcgctaaggtaagcaagggttggttcaaagttgtgtctgctgagtatctgaatgacgagaaatataatgatgatgaggatgcttggtactatgcagagggcaacggtgatatttatgctggtgagttcaagaccatcaaaggcaaaaagtatgctttcaggaatgatggacgaatgattaatggacttaagtttatcgctgataatggctctggtttatctgtaatcgcagatgatgatgatgactacccatttgatacagaagacggattcaatgataatgctccttattgggaagctaagggctataggtgctattacttcggtgatggcgatgatggcgctatgagaactaataagactaccattaccattgatggtgataattttaacttcttatttgaaaaatctggtagcaagaagggcgctggtaagactggtgaggatgataagaaactgtatcagtccggtatgcttcttagagctggtaaagacgagaaatatcaggtagtaaaggcgcttgacaaagacaaagatgtcaatgatgatggaaaaggccttgagggctataaaaaacttgaggatgttaaggaattcgtgaaatactttaagaacgctgatggtagtgtaggtctgaagaccgttgatccgacatccgtatcctctttatctaaccttggaatcagtaaaaaggcggatgatatcgatgagttatatgtgattcctgctactgacaaagatggcaaagctacgaagagcacgtattctctcgttaatactgctggtaaagttataaagagcaaatcaaagaataaggacggaaatgattactactattctgttgatagtaatggtgttatcatggcagtttacacagagaaatagtagttatctgtaatagtgtaaaaagctagggggaaggtgttgtaactgattaaggtgattcctattagttacaacgccttcttttagtatatacagtattttataaatgatgaaacggaggactttttgatgttgagaaaacagctgacagctattagtttggctatcacattaactttaggttattcgggggctgtctatgccgatacactatctaccagcacagttgtaatggaaaattgtggcgcttatctttttgagtggagacccgttggatatgataacggaaaatattttgcaattattgttggggggacaaccatatcagaaagcgatgtaatacttaacaggggctatgattatgcatatacttttaatacatcacttccaaggccgtgggggaatgttccggagttagtgaatatagatggtgtgtgggggatacctgagaattggtccatcttaccagaaggaagccagccagtaaccaggatggttcttgttacaaataataaacgtatgacaacaaacgagagatatgtggatatcgttagacttcccggaggaatctctacctctaccttacctccagaagttagaaaatatttgattaatgttgatggttccgatgccggggcatatgaaggaacaacaacaaatggttggaaccaagtagacggaaaatgggtctatataagtcctgatggttctttggtaaaaaatgcttggttggatgtagaagaaaagaaatattatatggatgcagatggttttatgttagctgatacaataacacccgatggtgtatatgtcaatagcagtggagtcaaaaccaattattttcctggatgggtacagagtggtgaatattggaaatatatgcagaaaaatggaagttatgcagcatctacatggattcaagacacggatggtaaatggtattactttaatattggtgagaagatggaaacagactgtattacacctgatggttactatgtagataataatggggtgtgggatggaaatgcctccgtaattggtaatgctaaaagcttaggacctggcgaggcgtcaaatgtatctaaacaaggttgggaggtatctggcgattcgtggaaatataggttggaagatggtagctatgttacgaatgcttggatgcaagattcagatggaaaatggtactattttaatgaatcttctctaatggttactaaccagactactcctgacggctattacgtcgattttgatggggtatgggctaatatataaatatatactggtttgtgaaaacatttctttaaataaagatttataaggtcttctgtgataaaatcataggaggcctttttattatggcaaaagaaaaaataaacctatacacaaaatgcaacggaacgatgaaaaatgaaatatcatccgcaggttcttaaggagtataatatcgaatctgcccaagatatcaaggatgttctcaaacgagcacagcaggtatcacaaatcagaatgttcggatcgtgacgactgtcgcaatggctataagactaaaaaatggataacagctataaaagcatggaagtcgaggttcccctcaagatcgtaaatctacctttgagtcataagtcacaaagaaatagacgatgccaatccggaactggggccaggtatatggggaactgagcctcatgtatgagggccgactgctgatgtaagagaatccaggaccgtttaaaccaggcgggaatccgcctagtcttgacatatgcagtattgtgcggtatatataaaccaagggctgaacgctcatagagaagctttcagccctgccattatcatagaagagctgcttttacagagatttcttcacacactctgtatatataatacaagggctgaacgcttatagagaaacgttcagccttatcattatcaaagaagtaaaaaatttacagacttttcttcacaccaacttccaatggccaattcgatatatccactttatggattcaatagtttatctaataaataagattgtaaaataaatccgtatattaaaaacacatagagttttcccatttaataccgttaggaattatccattaataacacccattttaaggttcatcggaaatattatcatcagcactaacctcagggttattagactctgtttgcggttgcccgcctggaccaaactttgtggtgtcaacaacttgggttgtagctcttccgtcccatacgccatctggtcctacatgatatccatcaggtgtgtcatagtcagttttcatatagccccccatgtcaaagtaataccacttaccatctgtgtcctggagccatgtcgaggctgcaaaataaccatttttcaaaacatatttccagcctctctcattctggaaccaaccaggcatatatttctgttttgccccacttgcgttaacataggatccatctggagtaattgtgtcagatagcatatagccatcattgtccatataataaagctcatcttccacattaagccaaccgtcgctcacataaccgccatctggtttcctgtagcgatatcttccattttcctccaatacccagccagaagtctttgtaccatcatatgctccagcatcagtaccatcaacattaataagatatttctttacttcaggaggcagtgtggatttatcaacattgtttggaagatatacaacgtcaatataacgttctttatcaggtaattttttattattggttacaagtacgatttgtagtgtggactgaatcccctcgggcaggaaaggctggttttctggaatagcccatactccatccacattcaccaaagctggtgcctcgccccaggaacgtgggtaattcattggatcaaaggtatatgcaaagtcatatcccctgttaagaataacatttctttctgcaatcgacctacctccaactaatatcgcaaagtatcggccatttccgcaatctaccggccgccactcaaaaagataggctccacagctttccataactgttgttgatgtgtcacttgctgtatcggcgaaggacacaagaggggttaccgaggtcaaggcaattgccatgcataacactgcccatttttttctaagcataaaattcctccgttttttacaatttttatatagagaaaaagcgctgagactaattttgttatcaatcagccacaacgctttcccccttaatatttaaattaaattaatattcaacaattaattttcagcatagatagcagcaatcttgccacccttcttaactacataaatatagtcattgccttctttattcttagacttagtatcaatcaccttaccagatgtattaaccaggaagtaatcgttgacacttacagaatcatcaatgatataaagttcattaagatcctctgccttcttattaacgccaagatccttcagcttagaaagatttgtagcgtctatgccagaattgtacttagcacttgtgatggaatcaaggaatgcctgaacatcatctaacttgctataggtgtacttactagcagcagttgcagtagtggacttgtcagttctcttgacaacctgatacttctcatccttaccagctgtgataagtttaccagactgatagaacttatcatccttttcgccagtaagaccagcacccttatggccaccggacttctcgaagtagaaactgaacctatcgccatcaatatcgatagtagtcttgttggttctcatagcaccatcatctccaccgccgaagtagtagcatctgtatcctaaatcactccaataaacggagttcttatcaaagtcatcttctgtatcgaatggattggtatcatggtcatctgcaatcacaccagtaatattattgtatctatccatctggatgaactttaagccgtcaatcatacgaccatcatttctgaatgcgtacttcttgcccttgatggtcttaaactggcctgcatacaaattaccactgccatctgcatagtaccatgcatcctcatcatcattgtatttatcatagttcagatattcagcagatactaccttaaaccagcccttgctcacgcgagcaccattctcaacatcctggaagtatctccactgcttagcatactgagcagatacactatgagtagcagtagcattatcacctctaagaccatttgtagaagcagtatcaacatccagagaccactctgctgtcatagcgccgtactgatcaaactcatacttcttgccgttaatagtcttgctcttctggctgtcaccattttcagctttaactttcttgccattagacttaaagtagaaccaacgggtctgatcctcgtcatcgttgaatacaggagcaatctcataatcagaagtagcttcatcatatgtgatatccatctgtaaccaaccaacagtcatagcaccatcatcttcaccaccgaagtagtaatcaccctctttaaagccatcaccatcagtgttatcgatgcgctctgcattgtcagctgctacccatccaaataacatacggccttcatcatcaaaagcatacttcttaccattaacggtctttaaagccacctttgaattatcgccattctttaaagccttaccattagcctggaaatagtaccagtaatgatctggctcatcatcctgtccagcatcctcgttgtcgatagctacccactggttagctgccataacaccgttgatgtctacataataatagttgtcgccatcctgaatcagctcgtcgatagccatttcgccatcactatttaaccagtaccagttgttaccggatttcttccactgttcagttgctctctcgccgtctctgttgtaatatacccaagtaccgtcttcctcagcccatcctgtagctgcgaaagaagtcatggatgcaccaatagcgagcagtgctgctgttgataatacagcaactaactttgtctgctttctcataattaatgcactctcctttttctttttgaaatactttttgaaattccttttttgcattacgagttgattatacttcggataaggaaaattatcaatagtttttttgcattttttgcaaattctactaaaattatgtaatatcgacaatcccgttaaaagctaaccagctccatcacacgcacttagtatattataaattccggaaaaataccataacttttacctgtgcattttcttacataattattacaaagatgttatgtctcctgaatattgtatttatatctatgcatgatgcaggttttcacgatacatgcaaaatctaccttctgtaatttgctcatctctgcggcttaaatcaagaacgggcaccacctccatgaactagtctggatgtgatgcccgcttatataactctaaattatttattcaatcaatccatatctgcaattgattttaatttacattcctaatataacgccataagcttcggccattcccttactctgaatcaattcatagtattccttcaccatgggaatcatctcacagagatcagcgtgccaataatcctccctcttcatgatttcttccacagaagcagttttcataaactgcattatttcatccccatcatttgctttatccgtacggtagaaggagattagtgctgccacagaaaatgtaagggcctttggataattcccgaacttttctttgtactctaaaatagtaggaagaactcttacctggaacttgcttacggaatttaatgcaatgcttaacagctggtgcttgataaatggattagagaatcgttccagaacagccgctccaaatttacggttatcttctgtatctccaattgtaggaatgatttcttcaaatatacactttttaaggaatgcggaaaccttctcatccttcatacattcgccaactgtttcaagtccatacagatacgcacccaataccatggaagtatgtcctccattgagaatacgtacctttctctttttatatggatgaacgtcatcggtccagacgatattgtagccggctttttggaatggaagttcatcttcatggtgaccgccgataacccacaggtgaaaaatttctgctgtgtctataagcttatcctcatagccaatctgcttagtcagttcctcgacctcatcccttgggtaaccagttacaatgcggtctaccagtgtgctgcagaaatcattttcatcttccagccaggttgtaaatccatcccccagctcccataattttgcatactgaagaacacactttttaagattgtccccgttatcatcaatcaattcgcagggcagcagaataagtccccttaaaccagccttatagcgtttatataagaactgagtaagtttagccggatatgacttgggcggcatatcagtcagattttctgttcccagatattcaattcctgcctcggtagtattagatacaagaactcttaagtctggattctccgccaatgctatatattcttcatactgagtgtatggattcaaagctctggatatggaagttacatgtgtatgctcatttaccacctgtccattatcaattccccggagaaacagattatattcacagttctggtcggagagcatttgacacatgcctttttcaatcggctgaaccactacaatcttaccatcatataaacctttttcctggagtttgtgaaagaaatagtctacaaatccacgcaaaaatcctccttctccaaactgaatcacagtttcttttacacctgtactcattttttacctccatagctatattttttgtaagtgcttacattttcagttacaactattctcttttatttctgagactaatatacaacataaattcttaatttgcaatagtgtaatgacttttttgtaagtatttacatttaaggtaatctattttttattactgcatatactttggcctattctgcaatcttatcgcatttttcattttcaaattctgtgttctgttttatattgcaattttcccttatataaaactagttcttgtaatttattttgtaaatatcttcctaataacattgactttcttacaaaaacatactattatattaaatataaagtatattttttcttacaaaattatgaaccaaaaggagaaatacgtatgagaaagcacacaaaagcacttgcaacaattatggcagcagctacattagcaatggcatccgcagttaccagtttagccaataccggttggcttaatgtacagagcaaatggtattattatgatgaagccggcaattctgttcgtaatcagtgggtagagaatgacaacgatctgttctggctcaaagataacggtgagatggccattcagtcatgggtaaactatgataacagctggtactgggttaacgctcagggtgcaatggtaactgacagctggattccgattacaaacaactggtattatgttggacaggacggcaagatgttagctgatacctggtttgagtataatcatcgcacatactaccttaccgagagcggcgcagcagcaaaaggctgggtagagctggatggcaagtggtattatttcgacagaaataatggagatatgaagagaggcactaccattgacggctatactgtcaatgcagacggtgtttatgttaaatagtttcacgaattggatgtattcctgatataaccaggatatgttttagtttatgtaccaataggatttaagggaaaaggacaaagagctatgtgttgattaggcggcacatagctcttttaatatatatttcagaaacttccccgcaaaaaaaccgccccgcctcaacatgtctcacacgtctcagcgcagcggtctttccatctaagtcatcctcagctttatcaactgaattccgattatacgattctatcagccctggtctaaaattacttcaatgtaaccttagcgccctcagcctctaatttagccttaacatcctcagcctcttccttggaagcgccctgcttaactaccttaggagctccgtcaactacgtccttagcttccttcaggcctaagccggtaacttcacgtacaaccttgataaccttaaccttgttaggaccaacctcggtcagctctacgtcaaattcggtcttctcttcagctgctgctgcgccagcgcctgctgctgcaactacaacacctgctgctgcggatacgccaaactcttcctcacatgcttttactaattcgttcagttctaatacggataattccttgatagcttcgataaactcagcggttgttaactttgccattttatgttcctcctgtttaatatttaataattgtgtttttcaatattgtccggcccctgtttgctgccgggcagataagcctttttctgtcaacaaaattatgcctctgcggctccaccctgctgctctgcgatctgattgagtacgcgtgccaggttggtgattggtgattggatgcttccaagcagcttgccaagaagttcctctctggaaggaatggttgcgataacctgggttcctgcctggtcatagtaggttccttcaactacggatgccttcagttccagctttggagctgtcttagcgaaattagctaagatacgtgccggagcagtagcgtcttctttggaaactgctaatgcggtaggtccttccagctgtggtgcaagtgctgcaaaatctgttccttctgctgcacgcttaatcaaagtattcttgtataccttgtaagcaaccccagcttcccttaactgcttacgcagctgagtgtcctgctctactgtcagaccgcggtagtcaacaatgactgcaccggcagcgccttccagcatagccttgatctcatctacgactggctgttttaattcaacttttgccatgaatggtttacctccttatatattttcgcattgaaaaccgtcatagcacgggaacgattcataatccgggaccgcacactactgtaccgggcaggcgacgcatgttgggcgcaccggacataccggacgtgccgggtatgcggatatgccaacagcggcagatataccgggtacaacagctgcaaagaccggacaaaaaacctctccgccgtaaagacagagaggttcgcaaaatctcatcataaataatcagagttttgtatgttcctcggcaggcgttttcgccttacaccttacggtacctgctgtctcagggcattcaatactgtggtatcatatcatattgtatgaatgatgtcaagccccactcagaattaaaacctcaagaataaaacattcgatttaaaacttcaaatcaaggctctaaaccttctgatgaatggggttttgtgcttatagcactatattatagcaatcaattagtttacaagctttgcaacgttcagcttaacgccaggacccatggtagaggtcagggcaacgctcttaaggtatgcgcccttaacggtgcttggcttagccttcatgatcgcatcaataagcgtctggaagttgtccgctaactgctcctctgtaaaagaagcttttcctactggcacgtgaataatgtttgtcttgtcgagtctgtattcaatcttaccagctttgatgtcgttgatagccttggtaacatccatggttacggttccggcctttgggtttggcattaagcccttgggtcccagtacacggcccagacggcctacaacgcccatcatatcaggggtagctaccacaacgtcgaaatccagccagccgtcgttctgaatcctcgggatcagttcctctgctcctacgtaatcagcacctgctgcctgagcctcgtcggcctttggtccctttgcaaatactaagatacgtacagtcttgcctgttccgtgaggaagaacaacagcgccacgaatctgctggtcagcatgacgtccgtcacatcctgttctgatatgaagctctacagtctcatcaaattttgcggatgcattcttcttcactaatgtgatagcatcagcaatgtcataaagtgcagcacggtctacgtttttcatagcctctgcatatctttttcctgatttcattctaaataacctcctagtggtattgacggggaatctccctcccacgttcatataacgggtaaatgccttagcaacccggaaaccttgctcgggtgtctccggattcatgcaccaattgtattactccttggtataattcccagatatgattctttggaattattcctcgatggtaacgcccatgcttcttgcagtgccggcaaccatgctcatggcagcctctaagctggcagcatttaagtctggcatcttagtctctgcaatcttctgaagatcagccttcttaagaacagctacctttgtcttgttaggaacaccggaaccgctcttgatgttgcaggccttcttaatcagaacagctgcaggcggggtcttggtgatgaagctgaagcttctgtccgcatatacggtaatgacaacagggatgatcatgtcgccctgatctgctgtccttgcgttgaattccttggtaaactgaacgatgttgacaccgtgctgaccaagtgctggtccaactggtggtgctggtgttgctttgccagctggaatctgtaatttaatatatcctgttactttctttgccatcttaggcacctcctaaaattatgtggtattgtcgggaatgtccctcccaccagcccctgccctgcagaagctgattccttgtgttacaaacggactcctacatcttcttgacttcggcaaatccaagttcaaccggtgtttcacggccgaacatctcaacgtgcatggtaatggtcttcttactgtcgttgatggccttgatggcccccacagtatccttccatgcaccggagataacaactaccatatctcctacttcaaagtcgactaagacatcttcttctctatggaatcccaggctggccatctcttcttctgtcagaggaaccggtttggagcccggacctacaaagcccgtgacaccgcgggtattccgcactacataccatgtatcatcgttcatgaccatgttgatgagtacataccccgggaacatcttcttgtccgcctttttctccacgccgtttttaagttcaaccacagggagcatagggacggacacctctaagatctggtcctgaaggttcctgttttcaattgttttctcaatgtcgaccttgactttgttctcatatcctgagtaggtatggactacataccaatgtgcttctgacatacaatcaccctcgcctttgtttcaatccgtactcgtttgctttttgtctgcttaaattaaagaataaagctcaaaccaaacttcataacgaagtccaggacagcaatcatcacgccaatcgcaatcgacatgaaaagcactgccacagtctgttttgccacggtttccttgtcagcaaagacgattttcttgtactctttcttcagcccgtgaaaaaagctaggctttttgtccttcttagctgccttcttctcaaccttgtcagccttggccgttttctctgtggtttctacagcgttaactgtattctcttccataatttcacgtcctttactgagcaggattactttgtttccttatgcatggtatgcttcttgcagaatctgcagtacttctttgtttccatacggtccggatgagttttcttgtccttagtcatgttgtaattgcgttgtttgcattctgtacatgccagtgtaatctttgtgcgcacgacttccacctccacttatattatcgtagttaacatttgccgctcaggtacttaattttgagcataaaaaaaagacctaagctcttccattcgcccgtttactataccatagaaatgtccgtacgtcaagggatttttgtggatttatggggtgtagaccggggtatgttggttccgtctgctggtttgaaatcctgccgtacaccccatatatcataaaatcatcattgtccatggccaatgaatatggttacaaaatatacatgctctgccccggcctttctgagagcccgtgtacacgcttcaatggtactgcccgtggtatagatatcgtccactaatataatattttttataccggagggcaggacggacgccgtgaaagcctgctccaggttctttaaccggccgccggagtccagggatttctggggagctgtctttcgtgttcgtttcagaatagaagtatttaccggaattcccaggggaccggaaaggcgccgggctaattcctctgcctggttaaatcctctttcccggcgccgggacggatggaccggcacagggataagggcatctccgtccatgaagcggatgcgttttcccattttcctgaccatggcctcgctgtagaaatccagatattcccttctattattatacttaatccgggccatggaatggctggctgtttcatcgtaattgataaggctcagtccgtaatcaaagctgcgcttatgtctggtacagtcatagcagtattcgatagtctcatccagaacttcctttccgcacttcttgcagacagggcggcgtacccatgacagctttgtcatgcagcccggacatatgaggtctcctttgggcaggacaataccgccgcatacaggacagcggcgcggaaacagaatatctgtcataaaatcaatgccttgtggaattatcttcatcagctttttctcctgtaccttctcagccaatggaatccggctgcgcatatatctccccgattctgtttttaagcccggaataccgtttctgctccacacagtttgacgccatggtgtaaaatgcgtccggctgtcccaccagacacacgcatgagcgggcgcgggtcacggccgtgtatatgagattgcgggtcataagcatgcggggaccattgtacatggggatgatgactgccgggtattcgcttccctgggacttgtggatggtgatggcataggccaattccagctcctccagctgcttgaagctgtactctatcatcttgccctcatcgaattcaacggtgagcagttccgcaaaatcattgatctcccggatgattccaacgtcgccgttaaagattcctgctcccttgtccacaggtatgccgtacttgttgcggacctcccactccatctggtagttgttctttatctgcatgactttatcgcctacccggtaaatgattccgcctgactctttttccttcttggacttgtccggcggattcaggtagttctgcatgatctggttcaaacgctccacccccagggcgccttttcgcatgggcgtcatgacctggatatcaaaggcattggcgtgtacatagtctggcagcttcttctggatcagggtgatggccgcgcttatgaccgcatccgggttgtcccttcggataaagaggaaatcctggctgcgttttgccaggtcaaccggctctccggcattgattttgtgggcattgactactatatcgctttgggcggcctggcggaagatgtgggtcagctttaccacattaaagctgccggactcgataatatcccgcagtacattccccggacccacgctggggagctggtccacatcccccaccaggataagccgggtgcccacgtttactgcccgcagcagggaatgcataaggctgatgtccaccatggacatttcatctataatgatgacatcggcatccagaggattttcttcatttctgtcaaaatgcattcccatgctctgggctccctttccagaccttggcgcgccggggatcacaggggcgtcattgccgggcattcccaccgggaccagttccagcatgcggtggatggtcctggcctcatatcctgttgcctccgtcatccgcttggccgcccggcccgtgggcgctgccagaagtatttccatcccctccatctcaaagtaccggatgattgtattgatggtggttgtcttaccggtaccggggcctccggtgataactaacagtccgctgtttacggcttcgtatactgccttttcctgcagttcatccaggtgtatggactcctgctgctgtatctttaggagattggccttgatttcgacctgtggaatgtctcccttaatgttcaggtcatgcagcatacgggctgcattgagctccagataatagtaatgggaggagtagaccaatgggccctgggcagacggctttaccaccaccttgcggtctatctgcatatccatcagatgcttctccatggcagacggctctacctttaaaagctcagatgcctgggcaaacagttcggtctggggaagataggtatggccgttggcagtagcctggagaagggtgtacagaataccggccttaatgcggtaatcggaatccgtaaagattcccacccgctcggctatctcgtcagccatcttaaagcccacccccggaatatcatctgccagacggtagggattttcccggataatcccgtataacgtgggaccgtactcctggtatatcttggccgccaggttcatggtaatgccgtaattctgaaggaacatcatggcctggcgcatatcctttttgtcctccacctgctcagctatggccatggccattttctcactgacaccctttacctcggacaggcgctccggctcctcctccatgatccggaaggtgtctgccttgaaatggcgcacgattcgggcagccaaagcggccccgatgcctttgatggcaccggagccaagatagcgttccatggacagttcatcctggggtgttttcatctcatagctttctatctgaagctgctctccatacaccgggtgctgggtcatatggccgctggcttctatcatgtcgccttctgccgcataagccagattgcctaccatgatgacttcttccccgtcgctctgatccgtgacgctcattactgtatagccgttttcttcgttgcggaacttaatccgctctataaatcctgttattgtctccatcgtttcatcaaaaggttaaaagaacccggtgccagggcatgtccggaatactccagtccatcacgctgtgccgggttctgatttttagtaatcttctcttccgccgcctactcccatggatgcctccatagccatgttcatgccatgggcaaactctataaacttgccggtaccgatggccactgcagtcagtgggtcctctgcaatcatggtcgtaatgcccgtcttttcctcaatcagggcatccaggccgctgagcagggaacctcctcctgtcatcacgatgcctctgtcaaaaatatcggctgctagctccggcggggtgcgctccaatacattgtggacagcatccacaatctgcagagcaggctccctgagtgcctccagcgtctcgtctgaggtaaccacgatggtctttggaagaccagtcaccaggttgcgtcctctgacttccatggtcaggacttccggcctgcggtatgctgctccgatgttaatctttatctcctcagccgtgcgctcgccaatcagaaggttgtgcttcttcctcatatagcgcaccagtgcctcgtcaaagtcatcgcctgcaatcttgatggatgtgctgacaaccgggccccccagggaaatgaccgcaatgtcggctgtaccgcctccgatatccacaatcatattaccgcaggcctttccgatatcaataccggcgccgatggccgcagcaaccggctcctcgataatagccacttccctggcgcctgcctggtaggtggcgtcctccactgcctttttctcaacctctgtggctccgctggggatacatacgctgattctgggcttgcgcagtgttttcttgcccactgccttgctgatgaagtatttaagcatcttctctgtaatggtataatctgaaataacgccctggcgcagaggacggacagcaacaatgttgcccggggtacgtccaatcataagacgggcttcctcaccgatggccatgattttgttggtatcgcggtcaatggccacaacggacggttcttttaacacaacgcctttacccttgatatatacaaggatactggcagttcctaagtcaattccaatatcattggacatcatcgaaaacatatagatagttcctcctcgctaactgagccggaccggaagcacacactggtggcctccatgcttgtcccctgtggggaccaaacgccggaacagaccgcatcaatcgcttaaaatataaatggttgcattgcattacttctatgcattgcttctattatatacaatattgtaaagttttcaaagggtttttttcttttttattttctttatgtttttttcatgccaaggacatattttcgtcacaattattgcttattataataacaagttcaccgagaggtggacgaggcctttgtttcaagtgattacttgaaatcacaaagctttttcatactcataccggacggagtaatccgtccggcccccctataacattttctttttttatatacctaccattcccacgcaggcgataagccatgcagaaaaaagcagaaaaagaaccggcaccgtatttgcggatgccggttcttttttgccgtatgggtccatggccaaagaccgtctatacttttccttatccgaagtataatcaactcgtaatgcaaaaaaggaatttcaaaaagtatttcaaaaagaaaaaggagagtgcattaattatgagaaagcagacaaagttagttgctgtattatcaacagcagcactgctcgctattggtgcatccatgacttctttcgcagctacaggatgggctgaggaagacggtacttgggtatattacaacagagacggcgagagagcaactgatcagtggaagaaatccggtaacaactggtactggttagacagcgacggcgaaatggctatcgatcagctgattgaagacggcgacaactattattatgtagacatcaacggtgttatggcagctaaccagtgggtagctatcgacaacgaggatgcaggacaggacgatgagccggatcattactggtattatttccaggccaacggcaaggcattgactcagggcgataatgacaaggtttccctgaaaacagtcaacggcaaaaagtatgcttttgacgatgaaggcaggatgctgttcggctgggtagatgaagacagcgctgagcgcgttgacgatacggacggcgacggctttaaagaaggcacctactatttcggcggcgaagatgacggcgcaatgaccgttggctggttacagctcgatgttacctatgatgaggccaccaacgacgattataagtataccgctcctgtgtttaatgatgatgaggaccagacacgttggttttacttcaagtccaatggtaagaaaatttatgctgaagacggagaccgcacaaaggataagaccatcaacggcaagaaatatgcctttgacgaatacggcgcaatggtagctgagtggtctctggacgaggaagatctgccaggcaagagccttgcctcctactctgatgctgtagaatccggcgacgttaatgccggaacagccagcgcttccaatatcataaccggtaaggcctttaatgccaagtacagcgaggcatggaaatacttcaacagcgttgacgacggcgcccgcgtaagcaagggctggttcaaggtagttcctgctgaatatctgaacgacgagaaatacaatgatgatgaggactactggtactacgcagacggcagcggcaatctgtacgccggtgagttcaagaccatcaaaggcaagaagtatgcgttccgcaatgacggccgtatgattgacggactgaagttcatctatgaagacaaggatgcccagagcctgactgtatgggctgatgacgatgatccttacagatttgactccgaggacgactttgatgataatgctcctctctatgaggctgccggatactactgctactacttcggcgacggcgatgacggtgccatgaggactaataagagcacagttgagattgatggagaaaacttcaacttctactttgagaaatccggcggcaagaagggtgccggcttaacaggcgagaaggatgataaattctatcagtcaggcaagctgctgaaggctgacagtgatgataagtactctgttgtccagagacagttagtgaagaaaacagatggaaccataaacagcgagcttgaggtagttaccactaaagacagcactaccactgaagtttacaatatgctggatgatgttgatgaattattgtccgtaactaaagatgcaggtattgaaatcttaaccattgacgaccttaattcctctgcttactcaggtaaggctgattctattctgaaggcagcaaacattaataaggatttggaagacctgagagaggtttacatcttcggtaccaaggacgaaaatggcaactttaaggcatctgagctgaataccaaggattacttcctggtaaatacatccggtaaggtacttgacagcaagggcagacataaagacggcagtgattactactacgctctgaccggcagcggtaagatcgccggtatctatgtagaggattaatccaaactgcggtaagctgatgctgcagattaattagtaatataagggggaagcgttatgactgatttagttgattgtcataacgctttcttttattatccaaattcataatgacaacaggaggactctattttgtttaaaaaaattgcaatattgggaatggcgctgatgttaggcctctcttcttccactgctgcctttgcagaccagacagagacatcaaccacaactatggagaactgcggggcttttctttttgaatggaggcccgtggactgcggcgacggtcattattttgccatattagtaggcggaaatactataagtgaaagtgatgtcatcttaaacagaggatatgattacccttataccttcgactatacggttccgcgtccatggggcgaggttccccagttagttaatatagatggtatctggggtatccctgaaaactgggccatccttccggaaggaagccagcccacacttcgcatcacgcttgttacaaataataacatactccccaccaaggaacgatacattgatgtagtcagcctgccgcggaatattaattccagggacctgccggccgaagtacggaaatatttaatcaatgtggacggttctgacgccggtgcctatgacggcaccaccacagccggatgggaagaggaaaacggtttatggcgctaccggaaatcagataatacctatgtctcaaacacatggcttaaactggatgacaaacaatactacatgaacgaacagggcatcatgctggccgacaccattacccccgacggctattatgtaaatgcaaagggcgagaaaacaggttacatacccggctggctccaggacggcgcaagctggaaatatgtgaggaaaaacggatattatgcagccaatcaatggattcaggacacggatggaaagtggtactattttgacatggcggctgtcatgctggcggataccactactcctgatggctattatgtggatgccagcggtgtatgggatggccagcccgcctctgctgtcataaacggtgaaaatcccggtccaggagtggacacagctgctcatactgaagaataatcctgccttttctactgcggcactgataagcggcaaccggggtaccattttggtactcctctgccgcttatcattttatccggaagttagacattttccttctatttgtctatacttttgtgtttatcgtctggttttcatgaataatctatcgaaatttgttcatcaatagacaaataaatgaaactgtatatttatttttgaggaatcctgagctaatatatttgttaaaaaatgaaaggagcaaacttataatggaacccatggagtccccgaatttcttggaacatgctgaacttctggatgaaaatacccctcattatctcaatgcatttcacaaatatctaatccagcataacatgtcccctaacacaatcactgcctatatctatagcgtaaggcacttttttacatactttggacagcttaattccaataatgtcagcctatacaaagtatacctcttagaccattatcagccccagacagtcaacatgcgcatccgcgctctgaactgtttcttaaaattccagggcatcagtgattacagaatacgcgccctccggcttcagcagaaaaaatatacggactacatcataagccaggccgattacgaatacctgaagcgcagactccgcgaggatgaacaatataccttctattttatcatacggttcatcactgctaccggggtccgtgtcagtgaattgatctcttttcaaatacaagatgtcataaacggatataaagacatctattcaaagggaaataagatgagacgcgtttatatccccactgctctgcaggaggatacactccgatggctggaatctgaattcagaaaaaacgggcctctgtttctgagtcacctcaaacggggcatttctgtctctggcatccgctctcagttaaaaacatttgcataccggtatcaccttgaccccaaagtagtatatccccattctttccggcatcgtttcgctaaaaattttatagaaaatggcggagatattgctttcctgtccaatctcctggggcataccagtatcgagactacccgcatctatctgaggcggagcagtacggaacagtcactcattgtaaatcagattgtagactggtaatggaatgaaaggtgtgctcagcatgaaaacaaatatgcaggaaataaatgaaccggcctttcatgcctatctgaaaaaagcccagtcctctcctaatacgattcgcagctgcctggctgcctacagactttatcattccctgtacaatgacctggcagtcaatcatctgctctgctttaaggactatcttatcaggcactacaaagcatccacagtgaataaccggatatacggaatcaaccgttatctggacttccttgaagagatttacggcagccaaatgatccacttccggctgactgttatccgtacccagcaggcagccttcctggacaatatcatttcccaggaagactatgaaacatttaagaaaagacttaaggacagcggaaatatgctgtggtattttgttgtgcggttcctggcctgtacaggagccagggtcagtgaattgattcagattaaagcggagcatctgcatctgggctatattgatctctatacaaagggtggtaaagtccgccgtctgcattttcctgatgctttgtgtcaggaagccctggaatggctgtctgcaaagggccaggtttccggttttttgtttgtcaaccgcagaggaaaccaaattactgcccgcggaatcagcagccagctcaagacactggccatacgctgtaacattccgcctgaaacagtataccctcactccttccgccacagatttgctaaaaattttcttgaaaagtttaatgatatctccctgcttgctgatttaatgggccacgaaagcattgaaacaacccgcatctacctaacaaaatcaacacaggagcagcgggagctgattgacaaaatagttacctggtaatattttgcaccgttattgtgctatagatatacggaaattccggcggtcccgaccggccgccggatatctcccgcccttacccggaacagaaatattatagacccccacctcttacattttccgaagatatccattactatattatttattggaaaaattaaccacacaagaggaggtattacatcatgacagccacaccaagattaacgtccaatcatgcattggaccagtttcagaaatatctcatgacccataacaaatctccaaataccatctgcgtgtaccgctatgcggtagaacagttctatcatctgtatcctcagctgaccccccgcaaccttcagctttataaggtatatcttttggaacattacaggccccagaccgtgaatctgcgcatacgggcgctgaactgctacatggaatacaggcaggcctccatcacccctgtttccatgataaagatacagcagaaaacatatctggataagattatcagccaggctgattatgaatatctgaagcggtgcctggcggagagcgaagaatatacctactattttattgtgcgcctcataaccgccacaggagtgcgtatcagtgagctgattacctttcagattgaggacgtgcacaccggacacaaggatatctattccaaaggcaataagatgcggcgtgtctatatcccccgcggactggttcgcgagctgcaggaatggctggctgccacacaccggagcaccggccccctgttcctcaaccgctttcactcccccatctccccgtcaggcatacgggcccagttcaaggtatttgcagcccggtacggcctggaccccgaggtggtgtatccccatagtttccggcaccgttttgccaagaattttattgaaaaatgcggggatatatcccttttatccgacctgctgggacatgagagcattgaaaccacccgtatttacctccggcgcagcagcagtgaacaataccgtatagtcaacaaagtagtggactggtagggggcgcgtcatgaaggaacttaagattagcgttatttatggcggcagctgtcctccccaggcagacccctctatgtataatcctgacaattatcaggcaaacttacagtatttccatgatttcctgcaacggcggggctcctctgcaaataccatcgactcctatctcacctctgtccggcattttcacagtctgtaccgtgatgttaccgtggagaatctccagtcttacaaagcatggcttatggaacgctacaaacccagcacagtaaacacgcgtatatatggaatcaaccagtatgtggcggccctccagtccggcggagacacgagtgacaccggaccatatacccctgctgcctccattgattttctggaaccttataaacttccctctgtccggcatcagcaaaagccctttcttaacaatgttatatcaaaaagggattatgagcgtctgaaacgtggcctgaaacgggataataatatgttctggtattttgtggtccgctttctgggtgccacgggtgccagggtcagcgagctgatccagattaaggcggagcatatgcagattggctgcatggatttgtattccaagggcggaaaggtgcgccgcatctattttcccgaaaaactctgcggggaaatgctgtcctggctggacagccgtcagatacagaccggttttatattcaccaaccgacggggcaaccccattactcccaggggcataagcagccagctgaaggtgctggcaaaaaagtaccggatatgcccggataccgtctacccccactcattccggcaccgttttgccaaaaactttctgactaaattcaatgatatttcgcttctggccgaccttatgggccatgagagcattgagaccacacgaatctatctgacccgttcctccgacgagcagagagagcttattgacagaattgtcacttggtagattgcattttctcaaaaaaaacagtatcataaaagaaactcgcaaaggatggtttatatgtacgaatatacgtggtatcaatggcttacattcttttttatatactgctttttcgggtggatttttgaatccacctatgtttctgcgaaaacaggtcactttgtgaaccgcggttttctgcgccttcccctgcttcccctgtatggaacaggcgccgtgatgatgctgtgggtatccctcccggtcaaggataacctgtttctggtgtacctggcaggtgttattgccgccaccattctggaatacgtcaccggctggggcatggaaaagctgtttaaaatgaaatactgggattacagcaaccagagattcaacgtgaaggggtatatctgcctcagctcctccattgcctggggttttctgaccattttcctcacagaggtggtgcaccgccccattgagcactatgtcctggggctacctgttatggtgaacattatctttgtgctgattacctccctgctgtttgcagcggatacggctgagtccgtaaaaactgccctggatttggccaaggtgctggatgccatgaccgacatgcgggccgagctggacgatatacaggtacagatggccctgttaaaggcagagaccagcgagcgcgtagcagaggccagagaggaagcggctgccaggctcagccggatgaagtcaggagctgccgtccatgcggctgcattgaaggatgacacggctgaacgcctgaatgaactggtggagaacaccatggagaaaatgagcggattcgtggagggtaccgctgaaaagatgggcgggctggtggaaaacacagccgaaaaggtggcccggacagcggaacggctgtcagagcttacagaggacgcggctgccagggtatccggtacgctggcacagcgggcagagggctcccggcaggcaatacagcgtgatgagcttaacaaaagtgctgtccaggatcgaaaggataaactggccgccctgtcccagcgccttgtatccattaccgaaaaacgccatatgctttccacccatatggacttctaccgaagaggcatactgaagggcaatcccactgcctcctcttcccggttcgctgaagctctgaaggaactgcgcgaaattgcggacaggaagaatccggatgaacatgatgcaaactaatgtcctgttttcttttacgcaaaaaaataccctgacagctttacacatctgctttttctgtgtcctgctgccagggtatttatgattcaattatacttttatggttctttcacatccgatgacacattacatcatcttatccaccatggccatcacagccgcgcccagcgcttcagacttggcgtcggcatcctccatggagctgcccttgataccatagtagaacttaatcttaggctctgttccggacggtctcacacagatccatgcgccgtcgtttaaatcatagtacagcacgttggaggaaggaaggcctgtaggctttacttccccggaagccatatcctttatggtatccagcttgtaatccctggcggaaaccaccttataaccgcccacctcttttggtgtattgttcctcaaagtctccatgatggactgaatcttagccagtccctcaatgccggataagccgatagacttaaccgcatccttataatagccgtacttctcatacatggcaaccatggcatcccacagggtcattcccttctgcttatagtaagcagctgcctcgcaaagggctgcggtagcggaaatggcgtccttgtcacgggcataggtgccaatcagacatccatagctctcctccataccaaagaggtatgtgccgcggcctgtcttctcattctttaatacctgctgcccaatccacttgaaaccggtgagcacttcaatcagttcacagccgtattcctttgccactgcgtcaatcagattggtggaaacaatggatttgatgacctgcccgtcatccggaatcttgcctgctgcctttttctggctcagcacgtactcacacagaagggaaccggacatgttgcctgtcagcgggatgtactctcctgacccggcgtccttaacatatacgcccagacggtctgcatccggatccgtagccagaaccaggtccgcattcttttccgcggccagcttaaggcccagtgaaaatgcttctgctgcttccggatttggatagcttaccgtagggaagccgccgtccggcagttcctgctcaggcactacatatacatgggtgaatcccagttccttcatcactcttctggccggaatatttcctgtgccgtgaagcggcgtgtacacaatgctgatctggtcctgcatctcatcaatggccttctggttcacaacctgggccttgacctgggcaatgtacttatcgtcgatttccctgccgataacctcatacttgcctgctgctgcggcagatgcctcgtccgtggtctttaccgtggacaggtcctctatggccagcacttcctctgtcacacctttgtcatgaggcggtgtaaactgggcgccgtcctcccagtataccttgtatccgttgtactcaggcgggttatggctggctgtaatattgatgccggctatacatcccagttccctcactgcaaaggacagctcaggtgtgggacgcagggactcgaacttgtatgccttgattccgttggctgccagagtcatggccgcctccatggcaaattccggggacatatggcgggagtcatatgcaatcgccacgcccttatctgctccgccctgctttataatgtagttggcaaggccctgggtggcacgtctcaccacataaatattcatccggttaatgccggcgccgataacacctcgcagtcctgctgttccgaactccaggtccatataaaaacgctctttaatctcattttcgtcaccttcaatggcgcgaagctctgcttttgtgtcctcatcaaaataggggtttgataaccattcctggtatatcttcatgtaatctttcattttatactccctcctgaatgtgatattccccgcatgacctgccggcattctgctgcagcacagccggaaaggccggtccgcagcgtattttctgattaagattatactatatcaaaccagaaaaaggaagtacaaccctctattatttttcgtcagacacagcccttacagtccgctttcaggcgttttaaaaagctgttcctggcctgctgctgttcctccaggccccgcagtttatcagtattccgggccggtatccaggccttgttggcgttgtagtaaaagttaagctgtttccagtatttttcaggataaaggaacaggtagtacaggcatcccctctccttcggctccatgggcagcaccctctcataggaatccagcatcgacagtcccagatccaggttccatccgtgcttttccatgaccttgcgcatgaaacggtacaggtccgatatctgtattccaagatgcatccggttgtactcgatgatggctgtgtaattgcctcccatgagcacatggtgctgatccagatccccatggcacaggtacaggggcttcctgtcctttttgacgggaggctggacctccgctgcctccagggcatcctggtcctcctggtatggccccagcttcaggcatttcccggtattatacggtccggtgccctctgacggcagttcatccgctccgggccacagctcccgtatgccctgtaccgcttccagggcctggtcgtaaaacatctgatagctgccgatgacgcacagctcaaattctgtttttttgcgcttggacctgatataattcctggcccgctgcatttcccggttatggcgctccagctcctcttccagagggccggacaggatggaacccatgttccactcttccttaaactcaatctttcgcagctggctgtgcagcatggccagcctggacagggcctggcgtatttcatatccgtcttttatattgcattcccggtccaaaaaccagtcctttaatatgtatctggtgccgtcgccggtcacggtcatcaggccgccttccctgttccgcaggtaccggtcagccctcaggcttcctctggtatccagccgtcctaagacctcgtcctcaaactccagacgcctggctgtcccacggtattcctttaaaagcctgcagccctggtccgtctcgcagatccaggaaccgcggccttttctcacggctcttacttccatatcatattgttctaaggcttccacgtacttctcgttcatccacaacccctccacactcttatcccatcacatttagtcgaaacgggaagctgccgtttcagctacttctagggtatgtaaagatttggttgtttatgacaggagaaatggcgtaccgttcctatttcccactttgtatataatgtacaaactgtttatgcaattcaggcgctatcatgcccatccgaaaacacccccaaagcggcgaatcatcatatatgatttccttgctccgggggtgtttcatttatctgtttgttattctgtttgttattctgtttgttattctgtttgttattctgtttgttattctgcctgtttttgtctgttaatctatttgcctgcctatatttgcctgcctattcatccttccagtgcagatggtgaagctgacccctcagctccagtttctcaaacccattctgccgcagcgcctcgtacagtacaattgccgcggaattggacaggttcagggaacgggtgtcgccccacatgggaatccggatacagtggtcctcattgtccaccagaatctcctccgggatgccggcgctttccctgccgaacatgagatagcagtccggaccgtaggtcacgtcggaatacaccttgcgggctttggtggtggcaaagtacatgttgcctgaggcctggggattgcgctccaggaaatctttataatcgctgtacacagtcacgtccagtttgtcccaatagtccagccctgccctctttaaggccttttcattgagcttaaaccccaaaggctcgatgaggtggagcctggtctgggtggcaacgcaggtccggccgatattgcctgtgttggatggcatttccggttctaatagtacgatattcatcatggtataccgcgcctttctgttattccctgccgtccagtctttttacgaaccgttccatgcgtcccagagcctctttcaggttatccagggagtaggcgtaggatacccttacgaatccctccccgcagtctccaaacgcagtacccggcaccacagctaccttttcctcttccaggaaccgggtggcaaattcctctgatgtcatcccaaagcggctgatgttggggaaggtgtaaaacgcgcccattggctcaaagcaggtaaggcccatctcctcataagcgtggagaaggaaacgcctgcgctgattgtaggattcccgcatcatggatacatccgggtccccgttcttcatggctgatacagctgcgtactggctggtggtaggggcgcacatgatagcgtactggtgaatctttaacatctgctccagaatgatatggggcgctgcggcatagcccagacgccagcccgtcatggcataggccttggagaagccattgataagcacggtcctctctttcatgcccggaaaggaggcaatggtcacatggcgctttccattgtatgtcagttctgaataaatctcatcggaaatcacaaacaggtctttttccaggacgatttttacaatttcttccagttcttccttttccataatggcgcctgtcgggttgttggggaagggaaggacgagaatcttggtcttgtctgtaatcttctccagaagcttttccggggtcagcttgaactggtccttttcctccagctcaatggttacgggcacaccgtctgccagtgtaacgcagggcatataggatacataactgggctggggaatcagtacctcgtccccctcgtttaacatagccctcagcgcaatgtcgatggcctcacttccgcctaccgttaccagtatctcctggtccgggtcatatgtaacgccgcatctgcgttttaaatattcgcatatctccactttaaggggctttaagccggcattggaggtgtagaaggtacgccccttttccagggagtagataccctcctcgcggatatgccagggcgtctcaaagtcaggctcgcccacgcccagggagatggcgtccttcatctcgcttacaatatcaaaaaatttacggataccggacggcggtatctttacgattttatctgataatgggtttctcatggagtaatcagcatcctttcatcctgcacctgctcacttataatggtgccgtggtctttgtattttttcaatacgaaatgggttgcagtgcttaatacggattccatcggtcccagcttgtcggatacgaactgggcaatctggcgcatggtcctgccctcgatgaacacagtgaaatcataggcgccgctcatgagatacacggcctccacctcgctgtactggtaaatgcgctctgctatcttatcaaagcccattcccctctgcggagtcacctttacctcgattaacgccactactttttcctcactggtgttatcccagttaatcagtgtgtggtatccgcagataatgtgttccttctccatttccgctatctcgttggccaccgctatttcgctttctcccagcagcacggccaggtccttaaggtcgattctgctgtttttctcaatgactgcaagtatcttttccctcataatatatcatcctccatccttccattgtttacataacttattaaattgcacactttattaatttacataacttccaaaccgtctcatattatctttgtcagttcgtcgggccggggccgctctaaaaaacctgcgccctcctgtccgtggcgtatctgcctggcacttccctccgccacacttccgataacgcccgcaggaattccttcttccctgagccttctcaccagctgtccgcccctgtctgacgccaggacggcgcagtttccgctgtacagccggtagggattcagctcaaataactcacacacctctaccgttacctgcctcacgggcatgcacctgaggtccacatcaattcccgcgttaaatatacctgataaattccaaagggcagctaatacgccgccctctcctgcatattcgtaagcagtgaaggagcagcgctcctccttctgttcacgttttatccattgttccacggaatatggctccgtttcatccagacaccttaagaacataggcgaaaagcgcgttttaaggaaatcccgcttttctgctcctatctttacagtccctgcaaatcccgcataaccggccatcaccaaatcctgacccggcctcataaagccgtcgcgcttctcaaacccacccggtccctgtcctgccgtacgcattatggtccctccaccggggtgaccgtggggcctccctgggccggggcagggtttgctgcgggcgccggattcgcttccggggctggattcgccgcgggcgccgggttcgcctccggggccggggccggctcaggagccggctgcgtcacgcccgggcctccctccacgccggttaccggcgctgtctctgccggagctgtatccacaggcgccgtcacatccggcacaaccggcaatgctaccggcagatcaggacctacccggtaaatggccttggatgcattgtaggtgtccttgttaagcagggttctctcctgctccacgccgtccaccgtcactaccttccataatctggatctaagtcctgtgtgggaggactggaccttgacccttgctcccggagccagggtgttgtctacaatgagctgcggctctcccggactggtgcttcccagggtttcagacacgtattccaccttgcggttagccggtctggtctccttgccgtatatggtgaaggtaagcttcctgccggaggtataaccctccacataaataggggtactgtaattgttctttatcttaatatccttataagtgcctgcaatggccgcgtccctggatggtttcacataggtgacaatcatggagtggttctgtctctggacaatctccacctccgcttccagggaagcgttatacagagtggtagccagctggcacacgcctccgccgatgctgtccacgacctggccgttctcataagccgccgctgtcttatacccattggctgtggtaaaaggctgcaggcattcatagcctgacaggacatccccgggcataagaacgtgaccgttaatcttggccgcgcctactgccaggttggtggagcgggctgcgccgctgctgctgaaatcagttgtatatgtgcccagcacatcctgaatggtagccagggcctcactggtaatgaccggctgttcttctgttacctgggctgttacctctatcggctggtccagtccgccttccagggcctcgttaagggccgcctcggttcccgccacgtcaaccacccggccgggtacagagtccgtaatgacaaactgtccgttttctctggttatagatgcattctggggctctgccgtgattccctggcactgtgtatccacaaagttcttcaccttcgcggaatccacctctgtctccagttcaacctccacgggcgctgccgccagatctttttcaatcatgtactgtttaatcaggctgccgccggcatactggctgaccgcctcatcaattacgtctgtgttaatccagtgaaagcccaattcccctgctgtggtggccacatcctgtccatccacgctgagggtcactgactgggccgccaggccgtccacatattcctggaccgctgccttcgcctcctcagccgtcattccggccaggctctggctgcctgcggttatcccggccggcagcacaggcgccgcccaggcaatcactggaaatgccgcaagcagcgccatactgatggccgctgtcaggccggcatttcctatacgattcctcataaattctcctcttccaaactgtaatgcaattaatacataagtgcgcttaaggccataggaacaatcatagccaacactaatacaacaacaatgatggtggaaatgatcttcttggtctttggatctctcatattaagcattgtacattcacctcttttaataatatgccccagaatctcttctttagtctttctgttccccggatattctgctggtcatccgtccgtactgggagataatattgtcaatcatccgcgacacctcactgcggctcatggcatctatctgcacagttacgtctattctatgacattttaacaaatcgtgcaagtattctttttgtctttttgtggccggctgttctctttttgccttataaatcaagggtttcgccgcaaaagcttccggatgctcctccccgtggcgggccatcatcacctgatacagcctatgagccgcctccgcatccgcctgcgcccggtgggccgcagactgagaaacctcataaaaagagcaggcgcaggttaaattccgttttacatccgcaggcataaacagccggcagatgccaagggtatcaatgccctcccgttcaaaatccagcccgctgttcacagcggcccgtttcaggaaagcgtaatcaaacaatatattatgccccagtaaaggcagattcccgcagaaccggaccacatctccaatcgtatcctcaatcacaggggcgtacttcaccatatcatccgtaatccccgtaagagccgtaatcctctcccccagctgccgcccaggattcaccagggttacaaacctttcctccacccggccgtcctccactctcagggcagcaatctccgttatcttatccagcctggcctcaagtcccgtcgtctccaggtccagggctatgtacgaattcgtcatatcttcctctttccaataaacaccgtaaaaccattatgaaatcatagttaaagacaatccttatatttatgacccattctactacacttatggaggaaatggaactggaaataatagaataataaagaaatcaacatggcacagaacattttcatgaacaggaactgaatattcattgcaaagaaaagcatcctctccttcttcatgacctgaggatacagtccgcaaagcggggcagggcggacagccgatcccgtggctgcctgccctgccccgcttcgcggaggtaccctacgcgcccatcaccctccacaacccaagagccggggcctttactacatatatctcctccccatcctccatctcctgccatccatcctccatctccaaaacaggatatctggcaagcgcgtccttcacatccatgaattcataccctatccggcctatctcgtcctgggacacatattccggatttacggcataggtaatggtaaacctgccctcagaggagctgtgtatcatatgggccggcaccatggcggagccgggaaatgccccattttccatcagttccatggtatagggcgttcccttatagccgtaacggcgtatgagaccgtccacctccgggttctcgccaaaccccttgattcccggcgcaatgacaagtaattcgccgccgtcctcaatcatcatacgggtgcggtaaatggccttgtttcccacccaggtggtggaaaactcctccggctccagataagccaccaccttttttgcccggcgttccacctgtgtgatgcagcgtctttttgccagcgcagccgcatgttcatagacctgcctggacgccccggtaaagatgccgtgaagggcggtccttccctcctgctccgacgcaacggtcagtatgtatgccagaggcacatcccggagaaaatgttcctccccgtagtcaaacacctcccgcaccggcgtgtccgtatttcccataattgtctccagattacagagagcgcccagcatatgggtaccgttaatcatgggccttcctcccagccccaccagtatgttcttggtgtaattggacatgccgatgacctcatggggaaccacctggccgatggacagaatcaggtcaaagcttccatccaccacacagcggttcacctccgcaccgatatccgacgtgtacctgcccccggacacctggccgcaataggcacccggcaccgtgccgacagggactgtgtcctttctccagtcatggtacagaaaaacctcctccggcacgtcctccccgaaaaaccgtatctgttcctcacggctcatggccctgtgggtccccaccgcaggcatgatgcgcacctttgcctccctgctcagacggtgatacagataggatgtgatgacacccccgtaggaataacagcgtgtgatatccggcggcactaagaggatacgcccggccttcggaagtccctccagcatacaatccatcactgccaccgcctgatgcgaagacagctcccctgactctgtctgtgcgctgaactcagctatatttttcaacatgtatgattccccctgcttcctgtattgtttcctgactgcttcatgagtgattccatgaattgtcttccggcctacttcttacgcttttccctgctgtatatgagtaccagcagtacgatgataactccctgcatgatctgacgccctgcctccggaatattgacaatggtcagaaaatcatccagtatggtcatgatgattgcccctgctatggttccgatatatccgccctttcctccggtaatggcggttcctccgataatgacggccgctatggtctttgtattgtagctggtgcccacatccaggaagctggtacccgtgtatcccaccaggaagaaaccggagacagctgctatgaccgcggatatcagatacacggaaaatgtcacccttcctgtgtgtattcccgaaaacctggccgcctgctcgttggtgcccacggaatatatcttcctcccgtagggagtattccgcagaagcacaatggtcacagccgccataacagcccatatgaccacaatgccggacaggatgcctatgaagctctgtccgcagatggccttcagaaggggagatgcattgcccttgggggcgccctttgtgtaaatcagaaacacgccctggataaccgttcccacaccaagcgtcatgataaagggcggtatcttaagccaatggattcccactccgttgataaatcccaccatcacacccatgacaataactgcaaaaagcgcagcgggcagattctcatttcggcccatcatgatctgcgccgcaatcacgttggcaaaggtgatggtattggcgatggataaatcaattcctcctgtcagtatggtcaggttctggccgattgcggcgattcccataaaggaggccagcctcaggattccggccacatgggtgggctttaaatagcccggtgacatgagctgggccgccagcaataataccaccagtataacatagaccataacctgggagctgcctgcatttttcttaataaactgtagattggaagcctgtctgttcttttcttctcccactttctttcaccttacctttctatccttaataataagtccccacaggccctaatgcctcttatgcagcgcgctgagcgacagggctgcaatcagtatcaggccctggcatatgaactggtaaaatgaagaaacgccaaacaggttcagcatattgttgatgatggaaatgatgaacacgcctgctatggtacccagagggtctcccaccgcgcctgtcatggcagttccgcccaccaccgtggcagtgatggcgttcatggcgtaattttttcctatggtggcgtcagccgaattcatctgggcgcttaagaatattccggccacagcgcacaggagcccggccagacagtaggcgcagaattttatctttcccacccgtatgccggtggagtaggctgcattttcactgcctccaatggccctcagggcctttccgtagggagtgctgttggcgagacttctcaccagacagaggatgaggatgaacagaagaaagggtaccgcaccggaatatccccgtgtcaggaacttggcaaacgccttgtgcacactccctcccggattcggcatgagcagtaaagccattccgtcaaatacggcggttgttgctatggttacaatgataggagccaggcgcccttttgtgaccaggacaccgtttacagccccgcaggccaggcccaccgcagccgctgcccccagggcagggacaaatccccaggcagagtccgggttcatggacatgacgcagaccacattgcacagagccacaattcctcccagggacaagtcaattcctcctgtgagaatgatcagcgtctgccccagggctgccatgagcagcggaaaagaggaacgcagaagattcttgaaattccccagcgtaaaaaagtccttattaaatatgcttacaaaaaccatgagagctgccagaaacacgtatatgataaccgtatgcccgtgtttatgccagaagtttcgattcaatctgctcttcaccctttctcaccttccttcctgttctttcccagtcccatgcccagctgcataatccgttcttctgtcagctcttctttttccaggacaccggatatcctgccctcgtacataacaatcacccggctgctcatgccgattacctccagcatgtcgctggagttcatgaccaccgccacgccccgggccgccaggtcatgcatgatttggtagaattcccgttttgcctccacgtcaataccgcgtgttggctcgtcaaagagaataaccctgggctccgtggccagctccttgcccagaaccaccttctgctggtttccccccgacagactggatacaggcaggtccagccctcccattttaatggaaagctttgacgccatggactcgctgaatgcctgttccgcctttttgtctatgaaacatcctttcatgcgctttttcatactggaaacggccaggttgtggcggttggaaagctccagcatcagcccctggttcttccggtcggagggcaccagggcaattccgtttgcaatggcctgccccgcgttctttatgcccacctgctttccattgacaataatagatcccccggacaggggatagagaccgctgacagcattaagcagctctgtctgtccatggccctgcagtccggcaactcccaatatctctcctttatgtacctggaagctgacctggttcagcttatggtcagcgtccgccagattctttacctcaaatattacctggctgtcatccacttcgcaaacaggcggagggaatacatgattcagggagcgtcccaccatcatccgtattaaatcatcctcatttatctcattcatgttcctggtcccaatatagcatccgtccttgaatacggtgatccggtctcccagctcaaacaattcctccaaacggtgggaaatgaaaataatcgtcttgccatccgcaatcagattgtggataatctgatacagctgctctacctcctttttggccaatgcagaagttggctcgtccagaataatcagttccgggtccctgaccagaatctttaggatttccgccatctgctgttccgccaccggcagactgcccacaggggcatccgggtcaatatggattccatagcggtccatgacgtccagaatgcgctttttaatttcctttcggttgattcttcccagacgggtaaccggttcctggtttaaataaatattttcccagaccgtcatttcccccaccagagtcagctcctggaacaccatggcaatccccagtttctgggactgctcaggattccggattaccacctttttaccatggaaatatatttccccttcatccgcctgatggattcccgccagaatcttaagtatggtactctttccggccccgttttccccggccagcacatgtacttcccccttactgcaggaaaattgtaccctgtccagggccgtgatgccggcaaaccgttttgttatattgaccatttttaaaatctcttcagccactgttaacctccttctctctccggaacagacatggtccttatgtgcaaaacaggccgatattcatcggcctgtccatcatccccaaagcgtgctgactacttgtaaagcttctgaagagtcgcgtcatccagctctgtaagaacccagaagctgtccggcatatctgaacggtaatactggtccacattttcttctgtaacggtctcaatatccatgaccacgttccctggaatatcctcgccgtttaaggctttgatgacaacccgcagagcctctgcgctggtgtaggtaggattggaaggtgctatgcaggacagccctttatccttattttcaatccatgcgcggatagcgccgttgttgccttcgcttgtcatgggaaccagatcccggccggctgctataaatgcgtcgattgcgccctgtgtcatggcgccgccctgtgaccacacgccgtcgatttccggataagcggacagcatggattccatggcagccttgccctgggcatagtcccaggaagcgttggctgatcccagaatctcgatgtcgggatactgtttgaacacttcctcagcaccgccccagcgcagggagtcagtagctgttcccgcgataccgttcaggaccacaatcttgccttttccatccagcttgtccaccagccactctgctccgatacggccgaattccttctcgtcaatgcctaccgtagccacctgctcatctgtctccaccacattgtcgaaggataccaccttgatccccgcttcagcagcctcttctaccactggcgcaagggctgttggggaggcagccgtaataacgatggcgtctaccttctttgtaatcagatcctgcatatcgctgatctgcttgttgatatcctcattggaattggtaatgtagtactcgcttaccactccctctgccttcagcttctccgcctcagccacaaactcctgttccatctgggccctccatgagtttccgatggaatagttgcacagggccaccacatatccctcaccgccggctgtctcagaggatgcctgggcctctgtggtctcttccgcttcttctttcttttcatcctgggatggggcggctgttgtctctgccgccgccggtgcagccgttgtctccgctgccttttgtgaaccgcaggcgcacaggcccattgccattactgctgccaaacctactgtaaacatttttctcataactcatcttctcctttttttaatagtaacagtcatacgtaagttacctctgatcgtcgaaaaacagccgtctggcgttatccgccataatcatctgccggtgggactccggtatatggctgcaatgcttttccaccaggttaatcagctgccgcatggtgccatggttcagcatgcccggataatccgacgcccacatcatcttctccggtcccacatggcggtagcatgcctggatgatttccacggaggagggccagggatattcctcgccaaaatacaccggtacggtggatgtgtcgatgaatacattggaacggttctttaccaaatccagcacttccctgtaattggattcaggcatcccttttttaaaacatgcatccgcccccatatggcacagaatgaagctgatattgggatacgctgaggccaggaagcccgcgtcctcaatgtcctctgtgcggaacatgtggatgaataccggctgatggtattgattgcagcagtcccacacaggagacagcccggaatccgaaaggcgggttccgggagcacactggaaggtgctgtccacttccaccttaaagccaaacaggattccctggtcgtagatggacgccagctctctggccgcctcctgtcctttcattatgtcaaccaatgccaccccccgcaaccggtccggataccgttttacgctgtccgcaaagtaccggttatggtacccgtaatagggattaggcataagaaccgccttttcgataccgcaccagtccatataggcgatgagcatttctgctgtgctgcggctctgttcaaaggacggaggaagaaactgcacttcctcatttcctatggcgacccgccccagatccgtggaggccatgggctgtcccctggtaattcccgccacccgctcatatatatgggcgtgaatatcaattacgttcatctaaatccccctacctgtacatttgtgtatattgcactttaacagcactgtttttcggatgccattagtatactatgaccatatttttatgtatatatgatttgattggaatatgttttgatttcattctatcttattgacgctccctgcaaatcgtgatttaatgataacaactgttacattgggatgatatttttatcataaggagggattttatgtatcagattttatcgtatcctataaaaaaagggcagcccacctggcccggcaaccctgcattcagtctggaaccccacacctccattgccggaggcgacacagccaacacctgcaccatccatctttttaaccattacggaacccacctggatggacccatgcatttttacggaaagggcattcccctggaccaggttccctttgggcaatttttctttcataagcccctgctcctggatattccaaaggaacctggcgcaaagctcatgcccgaggatctgattccccaccgtgaggacgtaaaagacgctgatctgcttttaatccgcaccggtttctccaaataccgcagagaaaaaccggatctctatgaaaacaatggtccggctgtcagcagccggctggcccggtaccttcaggataatatgagccatttaaaggccctggccctggattttgtgtcccttgcctcttacagcgacacaaaggatggggatctcgcccaccagatcatgcttggcatgtaccacaaccgttatatctgcatcatcgaggatgttaatatggagggacttccgtccggctttctgaaaaacgcagccgccgttccgctgataatagagggcattgacagttcccccgtcaccatgtgggcggagtactgatgcctatgtcacggtttatgctgcgatttaagacatggttcaagacatggtttaagatactatttaagacacgattcaagctgctgtttaggaaacactggtgccttctcatcatctgctccctgtgcgtcatcctggccattaccctgtatgatacctccaaccaggccgcaaactgggaaccggaaccggctgacagctccagcctccatgtgggtttttcccagatagagacagacaatccatggagaacagcccaaatcaacagtttccgcgaagccctgcttcccaatgggatggactttatctaccatgaaccggaggaccactctgttcagtggcagctggaagatatacgcagcctgattcgggagggcgtggactatctggtcattgtgcccgcggacctgtctgccctgactccggtgctccaggacgccaaggacgcgggcattcccgtcatcctcattgaccagtcggccgagaccattgaccagagctactatgtgtctcttatctccgcggactacctgaaggaaggccagatttgcgccggcctgctggcggataaattcggggatcagccctgcaggatcgtggaaatctacggcaccgagagctcacccggagcccaggcgcgctcaaaaggattccatcaggcccttataaagtatcccaacatggaaatcattgatgtggaatacgggaattttgaccgggtaacagcccaaaaggcaatggaaaacgcacttatcaaggccgccaaccggggacagaccatagacgcggtctttgcccacagcgatgaagacgggctgggggctctccaggctatcaaggtagcagggctgccgccgggtgaaatcgccattgtgtccatcaacggcatccaggacgtgtgcaaggccatcattgccggagaatatctgggcacggtggagagcaacccccgctggggatttatcgcggctttcctgatacagcagatggaacgggactgcaagccattccccatggtaatgattccttatcagattattactgctgagaatgcggccgagtatgcgctcaccgcctattaatacaggaaaggaaacgggattcatgaaaaacttcttccgacagctttcattccgcaggaaactgctgatttcctttgtgacgctatcctgtatccctgtgctcctggtgggaattgccgcctatcatctctataccaatttcatcatcaacatgaccgagaaatcctccatcgagaccattgaccttgtctgcgatgacattgacagcctgctcaatgatgcctggaatctctgcgacatgctgaccggcgatatcaagatgcagaaatacctgcgcatggactttgactctgtccgggaccagtattccaacgacctggccggcagcatggagctggcctctatctccacctaccgcaaggatatcttcggagtatatgtgttcggccagaacggcggccgctacaaatccaactactactcattcaaatcagaggaccagagggagactacatggtataaggccattgcgggcagcagggaaaccacctggtttccttcccatgagggcagcttcattgtccgcagctctatcagcgataacttcatcacagtgggacagccggtgatggataaggcttcgggtatggtcaacggcattgtggcagccgacatcaaagaggatgttatcacccagaaaatcaagcacagtctcagcaacggggtcatctgcatcattgatcaggagggaagcatcctgttccgctccaacgcaggcaacgatctccactatcccatcgacatttcccccagcctggtatcccatattctggaatccacaggcactgccgtgggaaaatccatggtagtgcctgacagcgggtacctggtggtaagccgtaccctgatgaattccaactggaggattgccggcatcatagaccggggctttctgacccagagcagcaaggacatcacccatattgtcatgctggtcctgctgattatcgcattctcctccctgtatgtggccatgcttatatcccagtccgtatacaaaccagtacagattctttaccgcatgatggaggatgtggaaaatggagatttctcggtccggtacacgtaccactcctccgatgagttcggacggctgggcaagaatttcaaccagatgctggagcggatccaaaagcttatcagccagatctatgaggagcagaaaaagcttaagaactcggagctgaaggccctccaggcccagatacagccccattttctgtataattccctggattccgtcatgtggcttttgagaatggacaagaatcgggacgcggagaaaatgctcaatgagctgtccacgctgtttaagatttcgctcagcaaggggaatgaaatcatcaccatcgaggaggagctgcgtcacataagcagctacctgtttatcaccaacatgatttacagcaagaaatttgaatacgccattgaatgcgaccctgtgctgtattcctaccgtactcttaagctgctgttgcagcccctggctgaaaatgccattgcgcacgcaatacccatgcctgggcagaaggtctttatacaggtgcgcatttacgaggatgaggacagccttgtactgtccgtgcaggacatcagccggggaatcgaccaggaaacccttgaaaaactgcagcagcagctgggaacagccgcccacccggaccgcagggattccgggtatgggctctacaatgtcaatgagcgcatccatatcctctttggaagcagctacggtctgaccgtcacgtcagagccggattttggcaccgaagtaaccgtaaagattcccaaactgaaaggagatgatatttttgttccaggcaatgctttgtgatgacaatgaaatcatactggaagggttatcccggcagattgactgggagggactgggcatctgcctttccggcactgctgccgacggacaggatgcctggaaccagatgaaggataatccgcctgacatccttatcaccgacatccgtatgccttatatcgacgggctggagctatccaggctggcaaaggacttaaacccaaacatcgtgcttctcatcatcagcgcgtatgatgactttgaatatgccaggacagccatgcatctgcgggccctggattatatactgaaacccattgatctggatgccatgaaccgcatactgacgaatgcggtttcccactgccggcagttccaccacgacaagcgtctgatggccacacagctgctgcgcaacatggcggtccaggaggcggccggccccgagggcattgtcttaaacgagctggaccttgagcctgattcatggtgctgcttcctgcaggtggagctggacgatcacagcttaagcaagctgtccgacgatatccgttatgcgtcagagcgcaggttttcggccctgagccagattctgtttggtgacagctcttatctgctggaatcccatcagtacagctacagcgtctgcctcacctcccgctccaggatggaactggccgcccggcggaaaattctggtggacacgatacgcaggcagttcccccatgaggggagctactgcgatgtcagcatcgcctcgggcagcattgtccagggcatccgcctgctccacaaaagtgtacagacctgccatgaagcaggcaagcttcatttcatcaagggttccaatgcggatatcttttacgaggaggtggagtcttatatctataatgagccggaggacagccagggatatcccataccggacaccaggcttattacttttatcaaggaacaaaataaggaagggattacaggagagctggagcaattaaaaacatggctctatcagaagggaagcgagagctatctgtatatgacattttccctgggaagcttctatacccatctgatgaaggaattgggggaatcaggaatcaaccttcaggatatatttcagaatcccatcgaagaattcaaaaaagtggcagccggtggtacactggagtccagcatcgaaaacctgaagcagaacctgttcaaaatctgcgacagcatacgcatcaacaaaagccgttacggaaagctcatagaccaggccatcctgtacatccagaaccactatatgtcctcctccttttccattgatgaggtggcgggagccgtatgcttaagcacctcctatttcagcactgtatttaagagcgagacaggaattacatttacggattatctgattaaggtaaggatggaaaaagccaggggactgcttgagaataccagcatgaaaatgtatgaaatctcatccagggcaggatatgaaaatgcggcctatttcagcgccgcattcaaacgatattatggaaaatccccttctgagttccagagccggaagtaggggcggccgacaaaaggaaagaccggccggcggcaggcaggaacgcaaaaaaggaggcaagtgctgcatggcgaagggaacggattgaaaaaaacctacgcctccctgcccggacattcctcccgcagaaagcattcacagcatttcgggcgcctggcaatgcagatggtacggcccagggtaatgatatgtatgttccacagaatccaatggtcctttggcagcaccttcatcagatcatactctatcttctccggctcctcctcttttgtaaggcccagcttcctggaaatacgctttacatgggtatccaccacaatactgggttcattgtatatattcccacgtataacattggctgtcttacgtcccacgcctgcaagggaggtcagctcctctatggttcttggcacctctcctccaaaccgttccaccaggtcccggcagcaggcaatgatattcttagctttcatgtgataaaacccaatggagtggatatcctgttccaattcctttaaatccgccgcggcaaacttctccagggtatcgtatttctggaataaatcagctgtgacgatattcaccctggcgtctgtacactgggcgctcatgataactgcaatcagcagctgccagggtgtctcatgattcaggtaacagcggtactccgtaccgtattcccggtccaatacatccaggatacgggcaatacgggcggccagttctgcttttgtctccctgacagctttcggccttccctgagtttttgtgccgccgccagcttttctccctctgccggcctttgtatcccggtcactttttatccctctgccagtttttctgtcagtctcaggttcatttaaaatggtcttctgcagcatatatccagtcctttcatcacaacgtttttgttgcatttacaacgttctaaagtttatcacccaattctgaccgcccttgcattatacgtcagcgggtccctgtgcctgtaatcaaacagcaccagggttccgtctcccatggcttcaatatgggccatcttactcatctgcctggaatcatacccttcataatccataaggtaatggggagattcctcctccctctgaaagaactgccggacagcctgtttataagggctttggtcccgggcaaaggatgggcggctttttacattttccctgagatataaatcatacatgagaaggtccctgaaccgttccataacagaggcatccagccctgcatccctacgtctggctatgatactatatagtatctcatatctggctatgcggctgtggctgatgccggtgagattgttttcacggtaatatgcagccatatccagaaacatttcatagggcgaaccgtattctgccgcaagcccggacagagtatggacaaactgtctgctgttataatacacctccgtcatatcctccacgccctttagttccaggatgtccctgtaggacagccaccgggtggacaggacctcatagggcggccgtgaggaatagcagaggccgtaggtcaatgccatttcttccatataagagcccttcagcactttgaggaagcccagctgaagctgctccggctccatggaatatacctggttgaacgaatgacggaaagattccaaattctcattgggcagacctgcgatcaggtccagatgctggtgaacattatgtgcctgattgattgtgccggtgatacggcgtatctcggctatatctgtcttgcggtgtatggccttaagcgtgtccggattagtggactgtacgccaatctccagctggaccagtccaggacgcatctggcccaaaagctcaatctcctcctggtccagcaaatcggcggcaatctcaaagtgaaaattggtgactccgttgtcatgactctggataaaccgccatatggccatggcatgttttttattgcagttaaaggtcctgtccacaaattttacctgaggcactccggcctccaggaaataagccagctcatcaaggaccagttccaggcttctgaaccgtacgctcttatcaatagaggacaggcagtagctgcacgaaaaggggcagccccggctgctctcgtaataaatgatgcggtgctccaaatcctttatatccatatgcttatatggaaatggtatccggctcatatccatggcccggcatacaccggtatctgccaacgaaccatcggggaggcgaaaggcaagcccggatatattttccagaccggcctgtccgtccggcaggatttttccactgtcggtcccttttttacacaacttatccacataatatccggccagctgtgcaaatgtttcctctccctctcccttcatgacgcctgttgcctccggcagctccccaagcactttagctgcatcaaaggacacctccggtcctcccagccatatgggcacatccggcagtattttccctaaatccgcgattagatatctgatatattctatattccagatataacaggaaaaggcaatcacatccggttctcttctgaatatatcctgaagaatctggtccagctggtggttgattgtatactcggccagctcaatagacggcttcgcaggttccatggcaccggtcccggttccacggttttttgcccggtcatgcctgccgcctgcttcccccagccccaatacctggtctgcgtaagccttcaggctgtaaattcccagattggaatgtatatatttcgcgttgacagccgtcagcagtatcttcatgggactatacctctagctcaattttatggccggtggactggtactggtagtaacgcactcccgcagcattcagcatacgcttggacgccattaccgccggtgtgtccgcatatttgtcttctctgtatacaatagtcttgattcctgactgtataatggccttggcgcactcattacaggggaacagggtcacatagagcttgcttccctccaggcttccccctctgtaattaagaatagcatttaactcgctgtgtgtggagtagaaatatttggaattgtaggggtcctccttctcattttccttgccccaggggaattcgtcatccgaacaccctttggggaaaccattatatcccatggacaggatcttattgtcctggctgacaatacacgcgcccacctgggtacttgggtccttggaacgtcttcccgacaacagggccacccccatgaaatattcgtcccatgttatataatccacacgttttccggtcattctttttcctccttttatcctttccgcagccgcctggctgtctctgcacacacgcagccttcccccgcagtgtccaataaatacagctcctgtctggacattcaggaacggctgcgtggctgcttctggtatcgttgctggtattttatattttcctctgtctgtgaatggattataacattccgggcttatttaatcaataaagttgcataaatcttgggaacgccttggaaatacccctgggaataaccggtgaataactgtttttccggtccttgcctttttccgggataaatgctatattataacaaccagacgatagcggaatataagtaactatcgctcattattctatatctttaacaatatctccaattatctgaatcgaacgattcatctcattattctgccccttatgtatcgggcaatcatttccacttttatatcacaccaattatttattaaaaggcagaagggctattgtctggtttatcggaaaacgctataatggggataggttcttatatggcttgccggaacaggaggctgtatggaagcagattatctgcgtgaacaggaatcagaatcagcaggggccagagggttcagccagctggtcaacggaatgaacgtatacagagtagaggtggttcggctaaaggacagaaatgcggacaaggtctttgaaaagctgcagcagaaaatcagccggggcaagacactggggcgccatgatgtatttcccctgcttctgacccctctgatgtcgggaaagatggagatgagccaaaggatttaccagggcatggagtttcttcagtgtaaggaactcaaagcaggggatgaggatcgaaaaagaatgcagtcagtactgtatgcgctggcagtaaaatttttggacagagatgaattagcgatgataaaggagaggatcggaatgactgttttaggcaaaatgctgtttgaggacggtgttgagaaggggattgaaaaaggaattgaacaaggtatagaaaaaggagtccagcaggggctggggcgcgcaaatgcactgaatgtgaagctggcagatgcaggaagggcggacgacattatccgggcagcatcggataggacttatcaggaacaattgttcaaggagttcggaatttagtagtaaacactttattctgcgcaaacacccgccggcccaaggatctttttaaggggtatattggcctttactgtgcagggcagattttcgtcaggtttgagaagcagcgatataaactgcatttctgacagaaccattatgggtcctccatgggtaaaccaaaacttaatatcaaaaagccttggttgaattaccaaactatgtaaatatgctcaaaagacaactttccacaaggggctgacgaattatgaagatagaaaaaccaccctctcaactgccagatatcagggtggttttcctatatagctgcttacatcaacaataacagacttttctttgtgttttcatccgccccagctttaccatcatctattttcaggcactgatttagtcacaatcacatccgtgtcataccccatgagacgcggtatgacaacagttcccgctttcacaggggcggtcagggtatacttttttatctcactcactgcatcgaaaatccggtcccggggtatggggtttgtcagcctcacgctggccaggggaagtatgccgccctttaccaatacagatgtggcaatattcctctggggatccgtcaattcctgctccacatacgccctcccctttgggcaagcggcgccctccacagaacaaatccgtctgcttccgtcttccctctcttcaatctgcgcccttatatcgcatccgttgggacagatgatacatgtatattctctcaacattcagcgctcacctccagccggcccatggacaccagtttatccgccttaaccgtaagttcaatcatttcggccggtatcgctttcttcattttctttgatgcaaccaacacgccgtcctgccttacttcaatgcggcattccttcaaaggactgtttaccctcagggacagcttaaaatccctggtgccgctcactctctggggaacggtatggttaatatggctgtccgttcctatttcgatgggacaggggggcagacatcctttctgcacaaattccgcagcagaatccgccaggctctctgcttccatggaaacaaagtccactaaatcatggacatggagcacatttcccgcagcaaaaatccccgccacatctgtctggaaatgttcatccaccacagcgccctttgtcctgtcatccagggtcacgccagcgtccagtgaaagttcattttcaggaatcagtcccacggaaagtatcagggtatcacacttgtattccttttcagttcccggaacaggtcttaagtgttcatccacacgggacaccgtgacgcctgtcaggcggttgtccccgtggacagccgttaccgtatggctcaggtacagcggtatgccgtaatcattcaggcactgctccacattgcggggcaggccgctgggatatggctggatctcaaacacggcctggacatgggcgccttccagcgtaagcctgcgggccataatcatgccgatgtcgccggatcccaggataaccacttcctttgcgggcattacattgtagaggttaatataagcctgggcaacccctgccgtaaacacaccggccgggcgctcaccggggattcccaaagcgcctctggtacgctccctgcatcccatggtaaggatcacggacttggccctccataccttaagaccccggcgtgttgctgccgtcactgtcctgtcctcttccacctccagaacagttgcgtccgtgatgtaaggaatccctaattcctccacctcttctataaatctctgtgcatattccggcccgcttaatgtggttttaaaacgagtcagtccaaaaccgtcatgaatgcactgtctgagtattcctcccagctgtttttcccgttccacaatcaatatattatggattcctttcctgtataaccggacagccgcagccagtcccgccggtccgccgcccacaatgagtacgtctatctccatttcctacgcctcctcccgcactctgccgaaaaacatctgtgaatcttttctggcatacctgacttctgttaccttttttcccaattcatcttctatcatctgcgcaatccgcatctggcagtatcctccctggcaccgccccatcatggagcgggtcctgtatttgactcctgccatggtgtcaactcccaatggattatgaatggctgccaggatttcagccctggttaccttttcgcaccggcaaatgacctggccgtaatcaggattctgccgtatcatctgctcctgctcttcttttgtcatctccgcaaaatgaggaattccttttctcacaggattaaaccctggattcggcgtaagtttctccctctcttccataagactgattgcatgacgggcaatgggcactgccgctgtaagcccgggggactcgatgcccaccagattaatggcgcggggcgcaatgtcatcccttatctctatcttaaaatcctgtataactccgtcctcatccacccatttaggcagaataccggaatagttgcggatatactcttttttatggatacatggccacaggtccgaagcactcttagccagatagtccatattttcctgaggcacgccatagtatgtaaaatctgttaccatctctgcgttgggtccaataatgacattcccgtcagtagtgttggtcacgtggattcccatgtaagtattgctgggaaccggatatacaggcatgggaagaagatatcctgtacgcttgtccagaataatgtaatcccccttggaaccaatcaccttatagccgcggatgcccagcatatcggaaatgttgccgcagcccagtccggcgctgttcacaacccaccgggtgtggaattcaccttttggcgtcgtaagtatataatttccttcgctgtcccgccgtattcctgtcacttcatggtcaaaataatacgctgctccgttggcatgggcattctcagccagggctatggtataattaaaagggtccacaattccgctgttagccgaaaacatggcaaattcccctaccacagccggaaccaattgatggagccgttcttttccaattagctccaggcctgcggcaccattttcctccccctgccggatggtccgtttcagtgtttccatatcctccgccgtattgcctaccagcaccttaccgcagcggatgaatttaaaatccagctcctctgccagttgtcccatgaattgattgccttccacacagagcctggccttcagcgaacctgtgtcataagcaaacccgccatggaccacaccggaattccggccgctggtctcatagcaaacatccaggttcttttccaaaacgcctattttcagacggtatctggacatttccctggcaatggcgctgcccaccacaccgccgccaataatgattacatcatacagttgtttcatgccgctttcctcctaaaggataattacaaaattcatcctatgaatatattttagttttaccatatttataaggtatagtcaagataaaatcgaataaaacacaactatttataggatgaatatttcctttttttatttcaccacaaaagttacccttatctgaaaacatctgcaaacaggtgcaaaaagtgtgtcccaaaatgaaaatagatgaaacggtgccctcttttctgttttttgcgcagaaaaggagctgctgctccagtagattattatttatctactttcgcaacagccccttggcagcaagccattactgttctttagctctcgtccccttcatcccctgcttcccatcccgcatctcacctttataacggttgtcattatacatcaggtggaaatacatagcctgctgcgcctccacaggcttcctgtcccggatagcctcaaatatcctgcgatgggatttaagagtctgttcatactctgtttcctggacagcaccggcaaacacacggacgccgtctgtgattaccggtaccaggttggtcatgaccagattatgggaacaatttgcaatctgggcgtgaaactgcgaatccttgtcagcatagtcctcccttagtatcatctgttcctccaggcccagaagtatgttctccagctggcggatatcctccacggtggcattctgggctgccagagctgcaatgggcggttccagcatcacacgcacctgaatcaggtcctctgtcagttttcttcggtcctctatcatggcaaaccccaaaggatcatcggacacaccgtttttgtctgaaataaaggtgcctgagccctggcgtatggtgacaatatttctggacatgagaattctaagagcttcccgcaccgtgttgcggccaacccccagaagttccaccagctcagcttccgtgggaagcttatctccggccgtatagccgtccctttgtatcatctccaaaagcttctgggatgcaatctcccctaaggtctgtttttccatgtttcctcctgcctgatgcattatacctttacaatcttatatccagccgccttggaaagccggttcataatagcctgtcccaggtggtccttgggaaagctctccgaaaatatgtagtctactcccaaatcatcaaactccctgagcagagcgtaaagattatgagccacggattcctggctttttcttgcacctatactgcgtacctcaccgtctgtatagcagcccctggactcgtccgtacagataactcccaccttatagccggcctcaatcttctcccgggagagctcccgcaccttgcgaatcatggcctggagctgtgtctcatccaatccggtttccgggtctgcccctgtgttccggtctgctccggttttctgctccgctccggttttctgccctgctccggttttctgctctgctccggtcacctgctctgctccggttttctgctctgctccggtcacctgctccgctccgctctcccgctctgttccagtccccggctccaccagtgtaaggtcagccttgggggcatagtgcttatacttcattcccggcgcctttggcctgacatccgcagaaagagggcccaggatagccgggtccacgcttacctcccccagcacctccgcaagcatttccatggtaatggcccccggcctcagaacagccggtaccgcggacgaaacatccactatggtggattccaccccgattcccacaggacccccgtctataatcatctcaatcctgccgttcatatcctgccatacatggtcggctgtagtggggcttggccgtcctgatgtattggcgctgggtgcggccacgggcactccggccagggcaatgagccggtttgccaccgggtcgtccggcatacgaattgccacggtatccagaccgccggttgtgccgtagggaaccttttcactcttgggaaatatcatggtcaggggacctggccagaaagcctccatcagcttcctgccagcctccggtatctcctttacaagaggcgccacctcctccacgcaggatacatgggcaatcagaggattatcagagggcctcccttttgcagcataaatttttcttgccgcgtcctcgtccagtgcattgccgcccagaccgtacacggtttctgtgggaaatgccaccaggccccctgaacgcagtatgccggctgcctctttcagttcctcatcctttatatgatttctgtcttctataataattctttttgtttccatgattcatacctcgattattaaataccgtttgctctatgtccagtctattttagcacccgccacagccaatgtaaagccgggaaatccggcctatcctgcacctgtcacttgaagattacggacatttcgtgtaaacttaagtcatcacaaatgattggaggctttaccaatgagcaacattaacagcgtaatgaaagaattcaaggcatttatcctcaaaggaaacatcatcgacatggccgtgggcgtcattatcggcggcgctttcagcaagattgtgacttctcttgtcaatgacatcctgatgcccttactgggtgccctgaccggaggcgcaagcttcaacacacttaaatatgtcatccatcccgcggccactataaacggggtagaagtagaagaagccgccatactctatggcagcttcctacaaaatatattggattttctcattatcggcgtgtgcatgttctttatgattaagacggttgccgtcatcagcagccggttacgccatgaagaagacgccaaggaagaagcaccggcaccggctggtcccacacaggaagagcttctggctgaaatccgcgaccttttaaaggaacgaaaggacatagcctgatattcctagaaaaaccgaatccgcttggcattctccacaaattccctgttattcctggttcttgcgaaaaggtcaagtatcttttccactgcatcctcgggtttcagggaattggtggccttgcggataatatccactgcctctgcttcctccctggacagcaggaggtcatcccttctggtgccggacttcaatatgtcgatggccgggaagatacgtttctcagacagtttcctgtcgagcaccagctccatgttgccggtgcctttaaattcctcatacacaacatcatccatgcggcttcccgtctccaccagggcagtggccagtacggtcaggcttccgccctcgcgcatatttctggcagcgccgaaaaaacgcttcggcatatgaagggctgccggatccagaccgccggataatgtacggccgctgggcgcaaccgtcaggttgtatgccctggccagcctggtaatgctgtccagcaggatgataacgtcacgtccgtgctccaccagacgcttggcccgctcaatcaccatctcggataccctcttatgacggtcaggcagctcatcaaaggttgagtagattacttccacatttggacccacaatggcctctcttatatccgtaacctcctcagggcgctcgtcaatcagaaggatcatcagatgcatatccggattattggttgtaactgcctttgctacctgctttaacagtgtggtctttcctgcctttggaggggatacaatcataccacgctgtccctttccaataggtgccagaaggtccaggacacgcatggccaccgtattcctctcaccaggtgtttccatatgaagccgcctgttagggaagattggtgtcaggtcctcaaagttgggccttgtctccgtggcgcttaggggatagccgtttaccgtcttgatgtagagaagggccgcaaacttctctgttgcagacttcaccctgcggtttcccactataatatctcctgttttcagattaaaacggcgaatctgggaaggcgccacatacacatcattttcaccgggaaggaaattttcacagcggatgaatccaaatccgtcgggcatgacttccagtatgccgtttgcctcaatcccgctgtctaactcagccatatcctggctggaaaggccgattgcgtcacttctattgtccgctctggcaaaacgctctccatcgttctgggaaggcgcgctgttctggctcattctgttattcatactgctgtttccatgtgtttggggagtctgggtcctgttctgtgtatacttgctgtcgtaccctcttgaaacagggcggcggttatccgttcccctgctgtcattccggttttcctgataatcctggctccttgactggttacgctcaaaggcatggggctggtcctggctccggggtgtttcctggctccgggatatctcctgactccggggcgtttcctggctccgggatatctcctgactccgaggcgtttcctggctccgggatgtttccgtttttacttcccgttttatttccgccggctttatatccgggtttttctctgcctcatcgcagagcaaatcaataatttctgcctttcttaatgaactgatgcccttaattccacggctcttggccatttcctttagttctgaaagaggcagggtctgcagtttttcacgcatagtatttctccttattaaattcaattcttcacccgcaaaaaaagccggtgtacgccttctgtctatattcaaattatcttctgttcattcaaattcggggtttattccagatttgggaattgctcagggactaacagactgccggcagtatcaagaaaactgccagctaatctatgtatagccctattatatacacgaatatcagggattgtaaagttaaaatttgagaaaatcagcttttaagccatttcatatgcgcatttatctgcttctcatagccattgtcagaaggttcataaaatacggttccctccataccttcgggcagatactgctgctgtacataatgcttgggatagtcatgagcatagagataacctgccccatgtcccagcttttccgctcccttataatgcttgtcctgcagatggaccggcactggcatggtccgttcgttcctcaccgcttccatagccttctgtaccgccatacaggcagcgttgctctttggagctgtggccacataggtcactgcctgggagaggatgatattggcctcgggaattccgatgcgctctgcggcctgggctgcgtttaccgccaccacaagggcctgagggtccgcatttcccacatcctccgcagcacatatcataattcttctggctatgaacttgatgtcctctcccgcgtacagcatccgcgccagataatacacggccgcgtccgggtccgacccccgcatgcttttaataaacgcggatatagtgtcatagtggttgtccccgttcttgtcataccggacagcccttttctgaatacattcctgggccactgccatatcaatgtgaatccgcccgtccgctccctttgcagtggtcagtacccccagctccacggcattcagcgcggccctggcatccccgttggccgtgtctgccagaaaatcagctgcatcctcgtcaatgtcggcatcgtaaatgcccattccccgttccttgtcataaaccgcccttcggatcagctccttgacatcgtccttttccaaaggcttgagctcaaatattctggacctggaaagaagcgctccgtttacctcaaaatatggattctccgtcgtggctcctatcagtatcagggttccgtcctccacaaagggcagaaggtaatcctgctgtcctttattgaagcggtggatctcatccacaaacaagatggttttccttccatacatgccaatgttgtccttggcctccttcaccacttcctccatgtccttttttcctgccactgtggcgttaatctgccggaaatccgcactggtggtattggcaatgaccttggccagggtggtcttaccggttcccggaggtccgtaaaaaataatggatcccagcttatccgcctgtatggcccggtacagcagcttatcctttcccacaatatgctgctgccccaccacctcatccagggtcctcggacggagcctggaagccagaggcgactccttctccatatccttttctctcatataatcaaataaatccatatctgtattctcctcagtcaatcagcagttcatccaccgtaacaaaagtatagccccgcttcgtgagcgtgtcaacgatttccagggctgcttccacagaagtggggaaaatatcatgcattaatatgatatccccgtcctccacatccttaagcacccgtttcaccacacggttggtattgcgcagtttccagtccagggagtccacagaccacaggacagtggtcatgcccaccctgcactccagctcctcattccagtccccatagggcgggcgcatgtattggggcctctctcctgtaatctcttctatcatccggctggttctgtccacggcctggcagactgcgtctgaaccggcctttgtaagctgcacatggctgtagctgtggtttccaatcaaatggccctctgccttcatgcgctttacaatctcctcgtttccctctatgttctgtcccatcagaaaaaaggttgcccggacattccgctctttcagcccgtccagcagtttttccgtgcaatcctcatttggtccgtcgtcaaaggtcagagccacacatttcccttccagtcccttggcccggtccagggtatcccctccctccctgacccaggagccctcatcggcggacacatgggccggcatctcccccctgaccgtatggataaggccgcccagcagcaaaaggtccgctatgcagacagctgccaggagctttgacttatttatcagcttcaccctgttttccctctcttatttcgcatccttatctatccagtatatgtgcaggggcaatataaaaatgcttttacctttttctccctttacagacttcataatatgtgcgggaagaagaaaacagcgccgggactgctcccggcgccgcttggctgattttacatcatattgaagttatatcctgataaaaatgataccctgattgagcttattgtccattacattaaacccagcggcggctgtcacggccctaatggcgtgaccaccacgcccggtccgccggatgaaccggtgacagcctggcccaaacccggtgcctggttagataccccgccgttctgtgaaggctgtggtgcctgtcctccctggctgccgtccggcgcctgggtctgtacatttcctgtctggctgtctccggtctcatttcccgcttcctgcacaacctggctgagcactccgcttccgtcagcagtataggccacgccgcctatatccacggtggtgcctgccgccatccggcctgtggatgggtccatatagtagtggagtccgcccacgtcgatcacgcctttggccatacgtcctgagccctcaaaataataccaggccccatccatctcacgccaacctgtggccatggcgccggaccccttcaggtaatagcgctcaccgccgtcatccagccagcctgtctgcatcacgccatcctggctgctgtaataccaggttccattgtcattgatccagcccctggaaagagctcctgagctgtccagatagtaccacttcccgttctggctggtccagccttttgccatggccccatttccctccaggaagtatctgcgcccgccgtcgtccagccagcctgtctgcatcacgccttcctggttgctgtaataccaggttccgctgtcattaatccagcccttggaaagggcgcctgagctgccgaagtaataccatttcccgctgtcggatttccagccggttatcatcttaccggtagtgtcatccagatagtaggacttgccggactggttaagccagcccttggacaccaaaccgtccccgttcatatagtaccatgtgccgtcatcctgaatccagttgttcttctgctttgcatagttctggtaatagtaggtctggccattgatggttctccacgtattcgccggaatcacagaggtgaaatccttgaactggaaatcaatatctacattgccgcttataccgtttacagcgccggtgctggttgcctgccacataacgggattctgataggccggtttggcggaatagcgcgccacccatacagggtaattcatcttgctcatatccagcttattggcaagccagttgtcattggcatagataaccggataatagcctgcctctgaaatccgcccgcagaacgcgttggcgatggctgccagctcatccttggaaagggttccctgggtggaatcctccatgtcaaaggccaccggataggagaccggataatcgtgaatcaggttgagaacaaaattcgcctcctccactgccatctccggcgtcatggccagggaatagatgtatacacccaccttgactcctgccgcgctggcctgctggatattcctgtggaaataagggtctactgcgccctttgaacgggtgcccagcatgacgaaggacacgtcgtccgcagctacctggctccagttaatatccccctgccacctggacacgtcaattccccggaacagcacattattgatagctgagccgtccggcatctgatatacgccgtttaccttcttccacacattgggatttgcagtggaagcagactgtcctgaggtgcttcctgttccggaagcagtccctgtgctgccggcggagctctgccccggtcctacgggagatatgaccgtggcggactgggtctcccccggtcccacggccagggatgtaccggcaggcacaattgtccctgctccgatgagtcctgccagggcaagtgcgtggcagcgcctcattatctgcgtcgtatttttcatagtattctcctcatacctttgtatttttcaaaaaagaggggatgtccagccatccgctgtcacatccccccttattaaaccgctgtcaatcaacctggtccgtctgtccgtcctggttcaagcgcagttgatgagccggatgggctgttattggaattgccgctggtcgggccgtttgaactgtttccggagccgcccggtgtgccgctgctgataccggagccggaagaaccggacactccaggtccgccgctgccgccggaactgccggaattattgttcacagttcccggtgtctgggccgatacgccgttggcattctggcatacgccgctgccgtcaaagttatactgtacaccgttgatggtggctgtggtacctgcaatcatcttgccctcgttggcagggttcagataataatacttgccgtccagctgaatccatcccgtcatcatatgtccgttgctgttgaagtaatgccaggaattatcaatctgcttccagcccgtggacatcttgccgttgcttgtatccatataatatttgttgccttcgctgtcgctcagccagccgatcagcatccggccgtccgtattcaggtagaaataatcattatccactttagcccagcccgtcatcatcttgccgtccgtgccaaagaggtaccagttgtccttgatctgtgcccaggaattaaccacgcactttccattgctctggaaataataccatgcgccgtccatctcacgccagccggttgccatggttccgttgccacgcatgaaatagtagtcatttccaatcttcagccagcctgtgaccatgcttccgtcgttcagcatataataccacttgccgtcctccggattgatccagcccatggccatgaggccgttgggcctgaagaaataccattttccgtcaatctgcttaaaacccgtagacatatgtcccgtggataaatccatgtaataccagccctcgctggtctgaagccatcctgtatgtgtctgtccattatagatataagtccaactgtcattggatttactccatccgtccgccgcatagctggtaaatacagaccccaatgacatggccccaatcataccggctgccgcgattgccgcacagtactttttatatcccatttgtcatcctcctcgcctggtatatctggccaggggcatagtagtccccagccgtttacatatcttcgattatagcacaatcccatattcatttggtaacaaatttattacaatttccgtaatttcctataatatttttttgcatagcggtacatgatgatggtgtattctccgaactcatctcccagaatacttttatatacagcccacaggcaccacaggaatccgcccagggcagcattggcatagagcgcaaacagttcgtcttccgagggctcccgcctgagataaagcctgaaaagccgctccatgtcctcttccttgtaataggaataaatagcgcacatggacacatccatcaccggatcgcacatgcctgcatactcccaatccagaagttttacactgccgtcctcaaaaaagagaaagttatccacatttgcatcaatatgacacaggcattttgggcgttccattgagtcaagggtatccataagccagtccatccacccctttacttcctcgtaatcctcaaacaaaagggcgccgtggctcctgcacagcttttcgtaaaagctgatcctctcccggatatcaaaggaatgggccaccgtgatgcctgactggtgaaggcggcgcaccatggacatgcatttctccatatcggcccaatctgcggaatccgcatttctggtaccttcatagtaatccgctatcttatacccggtcttttcattcatgtacagcacatgctcggtgatttccagtgaggcaacggcatcgtagactgttttttcctgttccctgttaatcagaagttctgttcccggacccggtatgcggcagatgcagtggcggtcctccaccttaaacagaaaggacttgttggtcatgcctgctttcaggcagcggatatccttaatgctggattccggtaccttgaatacctctgcgaccagcttcatggccgcattgtcagaatgattctgatagcgggggtcaaacaggcgcagctcctccaggttctcaaattcatatacctgatcatccggctgacggttcacatccatctctatttcatcccaccgggaggccgccaggccgccggcttcctgggctgcttccagcagtccgccgccttcctcctcaagccgccgtctggcctctccctccagcatgtccacatagacctgttcccagtaaaactgctctgtccccggcgtcttatagtaagcttccagcaccggaaggaactgccgggaaaattcccgggaaaaataagccggaccatacatgacccactggtcccgaccgcctacttttacgccggtgatcctcccctttttattgaaataaaggcaccattccctggtctctcccttctgaaaggcagagctgtaccaggccccgcattcataggaatgatacatattctcccgcatccagttatccgatgacaggacgtacatattgcgcccctccagcaccttcctggcccggtaaatggtggtcagggtgtttttgctggtatactcaggattgtacagaagctccacgccgtatttatcaataaggtattcaaacttctccttcagatatcccactgctatggttatattccttatgcccacttcgtgaagctgcttaatctgacgttcaatcatgcgctccccaaagacctccagaagccccttgggcgtctcaaaggtcagggggacaaaacgtgaaccgaagcccgctgcaataataagggcaccgtccaccttatattggtctaacagcttccggccatccggcataagcctccatcgggctttgcccttttggctgctttcctctcctatatatccctttgccagacattccttaatcaaaccattggccgtgcccagggagacatccagctttccggccagctctctctgggtaatatccggctgctccagtactgccctgcatacaagtccatgtctgtccattgtgtaatcctcgcttccctgcctgttttatgttcaaatctatcgctttttaaaaatatatgaacattatatcacaggagtgtgaaaatgcaagctataatctttcccaaatatttgtcccggcaatacatttttcttataacacaaaagacacgccattaaagcaattgtatagccattagctcgcaactgctttaagacgcatccttttttgactaaatcttatttagcgttctgacgaatattaattcccggtgtcgtatgtaaatgttccccgtcacgtaacacctgtaaaccgtttactataacatgtgtcactccgcgggcatattgcgcaggctgccgcaaatcgaatggtgtatccatatgttcataatcaaacactataacatccgcaactgccccctcatataatagcccccgtcctttcaggttgaaatgggaggccggcatgcttgtcatcttgcgaaccgcttcttccagactgagaatatgattctgccgcacatgatgcgtcaggaaccagtccattccgatgtaatgaagcgggaactgtgtgtgtctggccacctcgccttcaacagatgtactatatccatctaccacaagcatatagagtggattcgatattgtctctacaagatgttcatctgtaaacagccgtgacacaagaacaacactgtcaatatctggcgcaacagcggccagaatatcgaagtagcaatcccaaggttctttattccatagatgtgatatttccggaaatgtcatcccattaatgtccggaaatgcattattgttctgcatacgcacccgttcccactcaccgccggcaataaacctccagtaccggtcacagtcatgtttaagcctagtcctgatttccggatccataagcgcatctttcatctgttggcctggcaatgaggtcagccactcaggtaatatacccgccatctgaccgataccataatttaagggggtcatatctgtcagaacctcaaatccctcatcccttgcctgactaattttctccatacacctgcgcactgcatcttcaggtgcatgcgtattgtagcgtatattcatgtgagatacttcacctcgaatacgatggtgacggattaccgctaaaaattcctccaatgcctccagcacatgggcatctctgttccgaatatgactggtataaatggcatcatattcctttacaacacctgcaagacgcattaattcctccggacagcttgtacgtcctggctcgaattccagaccgctgctaagcccgatggctccatcctcaaatgcctgtctgagggcattctccattattttatactgttgctctgttacctccggtcctttgacaccggccagagttcgcaaggaattgtgtcccaccagccatgctaaattaccggatatacccatatgttctaactcgcacatgtgctctcccagtgtgcggccatagggtacaggcccattatcgaaatggccaaatcctccagccgtaccattccccaccggtggaaacggggccgtactgtctccgcagttccctacaatttctgtagtaattccctggcgtatcgtactctcgcaaaaaggattactttcaatcgtcacatccgaatggctatgtgcgtcaataaatcccggactcacaatcagcccgtctgcattgatgacatgccgcgcctcctcggtaatattacgctccatacaagcaatacactttcccctgattcccacatccaggcgccgccgcggatttcctgtgccgtctattacccatcctccgcgaatcagaatatctaacatttaactacctccatctgtatctaacttcaattgtttccaagtttcttcacccctttactgcaccggcagtaagcgtagaaataaagtatttttgcagaaaaataaaaatgataataagtgggaggcttgtcagaacactggctgccatcatatcattccataatgtgcggtactcacccaccatctgcgcaatcccgacagtcagcgttttagaggtctccgatttcatcaaagtttgtgaaaacatatattcattccaaacctgaataaaagaataaattgctgttgcagccataccaggtaaagttaatggacaaataactctggcaaagctctgatatttgttgcatccatcaatttgtgcagcctgctctaattctgacggtattgtattaaaatatcccatcatcatccacgtacagaatggcatagtaaatgcaatgttaggcaggattagacctacgagtgtatcaaccaggccatatatagtcagcattttatagtaaggaaccaaaagcatgactgctgggaacatctggagtaccaacaaaaatgtcataaatggcttcttaaaccttgaacggctgcgagatgccgcgtaaccagctaaacaggaaactataacagataccacggtggtaaccactaccacaatgatgctgtttctaaaatatgaagcaatcggatattttacaaaaatgtctgaatatgtctgtaatgaaggggattttggcatccataccggaggaatgacaaatgtttcttccaaagttttaagagatgtcagtaccatccaagccagaggatatagaacaatcaatgaaaaaaaaagcaacactgcataagaaaggattcctgcctgattatgtcttttaacttttttcatctgtcaacctcctgtagatccaactcataatgtagcatattataaataccactactgccattgctccggccagaccaaatttaaatgaaccaaatgccgttttatagattgtaacgcttacaagacttgttgaatttgcaggccccccgcctgtcaaaagatttaccatggtataatgtttaaaccagttcactgtatccagaataaaagccactgccaaaaccggaagaatagatggaactgttatatgccaaaacgccttaatcctgctgcacccatctacctgagatgcctcatagatatcctgcggtacggtttgcaaagcagacaaaaccataatcatcacaaacggataacctttaataatacatataatagctacaatgggcaaagctgtattaacactacccagccaggaaataggatctgataaaacccctaaattcatcagtgtataattaataattccatattgcggattaagaatccacttaaacaatactgcaaatacaacttccggaattaaccacggcagcatcagaatacaacgaaaaaatacacggcctcgtatatttttattgagaattgtcgccaaaattgtacctattacgaaatgacctgcatcaacaattaatatgaatttaaaattcacggacaggctgttacgaaatgccgcatttgatattaaggcctgatagttttttgtgccaacaaaattccatttattaacaagattagtgtcaaaaaagctaacatatataccataaagcattggataaataatcaacagaactgacaggactgcaaccggaagaaaaaataccaatgaaaaatgcctttccagaaatttgcccaaacttccacctcctcttcagacgccaaaaattgtacaggaaacctgggcgggatgatcccgcccagtctgtatctatttaattattagcgtccaaaacagcctgtacggcctctgctgtaattttcgcggcctcctcaggcgacttgatactacctgccaacatggcatttacattctctgccacaatattggcttcctctccgcggaatggtactgccacgtaatcaatattatattgagcgcagtccagaattgcctccacttcaggagctgcctcacgggccacatcttcgagttctatcaatgcgggcggacgtttagtaacacgtgtcatctctacaaaattagctgctgcatattttaaaaattcgattgcgccctctctattaggagcatccttaaacataatcataccatagggattaaggtacgccactgtctccttatccttcagcggtactgcgataaactttccatccatatccggattttgtacaacaatattcccaatcgtatggggaccgcttattgccatggccacctgatctgttgccagtaaattaaccatggttttataatctacctccgtagagccttggggtacagatccatcccggatagccaaattgtaataaaactcaaatgcccgtacaccatcctcagaaccaattttagttgcccatttaccactttcatctttataaatatcaggtgcatccgcagcaaacagagccagtgtaaaacgaagtgcgttgtttccatctggaaatcccatcaggctcataccatatcggtcaatctttccatcgccatttgtatccactgtcaactttttagcagtctctacaatttcatcaaagctctctggtacatcgagtccggcttcttgaagcaagtcattacgcagcagtaaaacgaacggagccgcacacatgggcaggccaaaaagttcatcattatatgtaaattctttcaacatttccggataaaagccttccaggaatttctgatcgaattctcccctgatatcttccacaattcccatctctttccatgcagcattattagctccattggtaattaccaaatccggcaaagtactggatgctgccatagactgtacggttgtcaggagatctgctgagggagttcctattagttccacttcatactctggatgtgcctcctcaaatccttttaccaccccagccagcacctggtcttccggactttccaccacccacggacccataagctggattttcgttctctctccggcctctgttgtggcagcctcagtcgaactgccaaccacagcatcggtttgtacgttctccttttttccgcatccaacagcagacgtagctgcaagagttaccgccaacatgatagaaactgttcttttcataacttacctcctttgtatgtgattgtattattgttccctaaatgatatcacaacggtatttttgaatcgcttcatcatcaatctcaattcccaatccgggccccattgggacatccacatagccatctctgagtttaaaatcctgtttaagcatttctttccgaatcggtgtatcccaaacacaatattccagcaaattggaatttgactgagtggcaataaaatgcaaagatgctgcaattacaattccactgctccaggcatgtggaatcacagtggtattatgggctgtcgccatcgcacctatcctcttagcctccgtcaacccaccacaccgtgtgatatccggctgaagaatatccaatttgcatacctctatcagttgtttaaatccatatcttgttgtttcattctctccgccggcaattcttacatctgtgctctccacaagcattttatatccttcataatcatcaggataaacagcctcttcgatccaatacggcttaaattcccgtatttcatttattagaagcagccttgatgcagcggtaacattgaagtcaccagaaggaatgaagcctatatcaagcatcatatccatatcatcacctatcgcatttctggtagcttcaaccaattttacacactcagactgcggaagctcaaaacctccccaccccattttgactgcactgaacccttgctctttccacctaagtgcttcctcagctgcctcctggggagtatatggcatcagggtactgccatatgctcttaccttgtctctctgaactccgccaagcagtttacaaatcggcatgtttaaagcttttccctttatatcccaaagggcgatatcaattccactcatcgcatggatgactactcccctgcgtccatagaacatactggaaagatacatcttttcccatattttttcagtttcaaaagggtcctcacctataatagcctgtcccaggccctgacagattctatgggagaccggtgaatctataattgattttacaacccatggagctgaatccacttcaccatatccaatgattccttcatccgtataaactttaatgataattccgtcctgtgcgctgtcattaatctttttaatttcccctttttggcgtactggtatcgcctctacctttgttattttcactcctatacctccttgccattttacttttgtatgatttgcacaattttattattaatattaaaaattagttgcttattttttatacttccactatacaccgcccaatgtaagttgtcaacattatcttgttaacaacttacattaaatctttttcttattgacatttgcaaaaaaatgtatgagaatagtcttatatgcccctaccagtctgagtttacttacagattggccgttcgatacttacctcaggaggatccgcacatatgtcagaagcgtttacattttcaaagacccctaagcaatctttaaaaaatttagcatatgaatcaattaaaaccgctattgtaaaaggtgatttacctccagggcagagattgctggagactgagattgcatctcaaatgggaatcagccgcggtccagtccgtgaggctatcagacagcttgaccaggaaggccttacctattctcacccgcatcgtggaaccgtagttcttgaaatggacccggaggaaactgaaaaggtctttgttcctacacgaagaattatcgaagaatatgtagcagaaaaagcttctttcaaacttgatgatgaagactatcagaacttagaggaattaattcagcaaatggaatgggctgataatgaagataacctgtatcagcttacggatttagatataaaatttcattcctatctggtcgaacactgcggcagtcctactatttatgccttatggaatagtgtcattgcaagaatccactcccgtttactgcttcagggaattatcaaagaatctttacatatagttcctgacgagcatcgggaatatcttcaatatataaaaacccatgatattgaaaagataaaggcgcatttgcaatcgcatatttattaatgtattactgcttcagaatatgttatagatagttatatttaaaaggcccttctggttttccagaagagcctttttgcaaaataatcattacacttcaaatatcaaatccccataactgggcattggccacagttccttatccacaatcatctccagctggtccacaggtgctctgagtgcttccatggccggcaccacttggctgtggtagacgagtgcctgaaccttaccaccctcagcggcggcagccttttctgtcacctccaaaaggcgggcaagggctgtctttatctctgccagcagctttgaggtctctatcagcagctctgtctgggtgcttacatcggcttcctggcatacccccttcacggctgcgatggaggaagccagctgtgtggtatacttgataactgccggtataatagacttgctggccatgtcatacatggtcctggcctcaatgttaatggctttggaatagttctcatattccacctcagacctggattccagctcagctcttgtgaataccccgaacgcctcaaacagcttcaccgccttatccgttgtcagggccgggatggcatccaccatggagcggatgtttggaagtcctctcctctcagcctcagccacccactcgtctgaatagccatttccgttaaaaataattctcttatgggcagccagggtctccttgatgaaatcatgtacagccatatcaaagtcctctgccttttccagcatgtctgctgcttccttaaaggcctctgccacaatggtgttcagcacagtattgggggaggcgatggaatccgaggaccccaccatgcggaactcaaatttattgcccgtaaaggcaaagggtgatgtacggttcctgtccgtggcatccttatccaggtccggaagaatgtctacgccggtctttaaggtaccgccctgtttggagtgggtggcttcgccggtgctgcacagctggtcgattacatcctccagctgctctcccaggaagatggatatgatggcgggcggcgcctcgttggctcccagtctgtggtcatttcccacatcggaggcggattccctgagaaggtctgcatggatatccacggccttgatgatacatgccagtaccagaaggaactggatgttttcgtggggcgtgtcgccggggttcaggagattggtgccgtcatccccggtcagtgaccagttgtcgtgcttaccggaaccattgacgcctgcaaagggcttctcatgaaggagacaggccatgccgtggcgtccggccaccttcttaagagtctccatcacaatctggttgtggtcaacggcctggttcacaccctcgtagatgggagcaagctcatgctgggcaggagccacctcattgtgctgtgtcttggcaggaacgcctaatttccacagctctttatttacatcattcatgtaagaaccgattctctcacggatggcgccgaagtaatggtcctccagctcctggcccttgggaggcattgcgccgaataaggtgcgtccggtgtaaatcaggtccttgcgctgcagatatttttctctgtctaccagaaaatattcctgctccgcgcccacggacggtgcgacccgcttggctgtggtgttgccgaataagcgcagtatccttaatgcctgctcattgacagcctgcatggaacgcagcagcggggtctttttgtccagcgcctctcccttataggaacaaaaggaagtggggatgcacagtgtcacgccgatggcgtcttcccgcaaaaaggccggtgaggtacagtcccaaaccgtatatcccctggcttcaaaggtagcgcgaaggccgccggatggaaatgaggatgcgtccggctcacccttgatcagctccttgccggagaattccatgattaccttaccgtcggagggagcagagataaaggaatcatgcttctctgcagtcacgcctgtcagcggctggaaccagtgggtatagtgggtggctcccctctcaattgcccagtccttcatggcatgggcaaccacatccgcaatactggggtccagctctgccccgtcttcaatggttttcttcagcttcttgtacacactctttggcagacggtccctcatcaccgcgtcattgaatacatttttaccgaacatctccgatacattcaatacatcgctcatagaattatccatcctctctttttatcttccttttccaaaaccgtttcccaaatcctcaggtcacagttctcccgggtcatacatctcttctcacgtaattatattaagtccgcgcggatatataataaaaaggtgttccccctctgagagagaacacctttgttctttattaaaataaaccatttccactgaaattgcaagtggtttttaaataaatatgcatttttattctaataaggattatgaagctgcattaataactggcatccgttatagtgatgtaggttataaatcagccggtacatcatatattaggccttgccgacggaaccgaacagctccatcttttccttaacagttgcccggatagcatcagcgcccggagccagaagctttcttgggtcaaagcccttgcccttcaggtccttgcctgcctcgatgtattccctggtggctgctgcgaaggacagctggcactctgtgtttacattgatttttgcaacgcccaggctgatagcctttttaatcatatcctcagggatacctgtaccgccgtgaagaaccagaggcatgtcgcctacggctgcctttacctgctccagtacatcgaagcgcaggcccggccagttctcaggatatttgccgtggatattgccgataccggctgccaggaagtcaattcccagatcagcgatggccttgcactcctgaggatcagcgcactcgcctaagcctaccacgccgtcttcctcaccgccgatggagccaacctctgcctccagggacagacccatggcatgtgctaccttaaccagctcctttgtcttctcgatgttctcttcgattggatagtgggaaccatcaaacatgatggaggaaaatcctgctttgatacatttatagcagccatcgtaagtaccatggtccagatgcagggcaaccggaaccgtgatgttcagttcttccatcatggcctcaaccatggcagcaactgtcttaaatcctgtcatatactttcctgcgccctcggatacgcccaggataaccggagatttcagttcttctgctgtcagcagtacggacttggtccactccaggttgttgatgttaaactggccaactgcgtacttgccttcccttgctttttcaagcatgtcttttgctgaaactaacatattatacctccttataactttgttattttattaactatctcacccattatatcgcatacgcgaacaaaaaggaagatgtttttcattaaatcagctgatgcccaggatgtcctttacctcgttcttcatatcatccacgccgcattccctgttatggcggacggctgcatggcggatttcctccacagcctggggaacagcgacgccggacagggcgcttaacgcatccacaatttcaaattcatccttgccctccagtccttctctgcctgcaatggcttccatgacactgtgggagaatttatacggactggcagtggacgctatgactgtctttgtgtcatccccgctttccttcctgtaatttccatatacagaagccgcaacgcctgtatgggtgtcaatgagatagcccgtatcatcaaacagttttttgatggtggcagcgttctgttcctgggtggcaaaacctcccacaaaatcagacatgaaggcgcgcatttcaggcgtaacctcatatcttccttcctgggaaagcccccgcatcaggtttccgcttgcaagggcgtcacatcctgtactcatgtagatgaggcgctccagattgctggatataaggatatccatggacggtgaattggtgaggataaactctcttttcctgtcataaattcctgtggtaaaaaagtcatacaagactttattgtcattggaggcgcataccagagtctttacaggaagtcccatgcgtttggcaaaataggctgccaggatgttgccgaaattacctgtgggcaccaccacattgatattctcgcccttctctatctctcctgcttctaacagtttggcataagcatatacatagtatacaatctgaggaaccagacggccaatgttaatggaatttgcagaggaaaactggaacccctttcccataagctctgcttccaggtccttgtccccgaacattttcttcacgccggtctgagcgtcatcaaaattgccgtggattgccaccacagaggtgttgtcccctttctgggtgcgcatctgaagctcctggaccttgctgactccgtccttgggatagaatacaatgatccgtgtgccgggcacatctgcaaatccggccatggccgccttgcccgtatccccggatgtggccgtgaaaatgacgatttcccggtccacatggttcttcctggccgctgtcgtcataaggtgcggcaggatggacagagccatgtccttgaatgctatggtgcttccatggtacagttcaagataatatgccccgtcagcctttgccagaggcgctatctcctctgtatcaaacttgctgtcataggccctggcgatacagtcctttagttccttttccgtataatctgtcaggaacagcttcatgacctcatacgctgtttcctggtatgtcatggacgccagcttttcaagaggcacatccagctgcggaatacaggacggcatgaacaggccgccgtcctttgcaaggccctgtaagatggccatggaagctgtcacttccttttcaccgcctcttgtactctgataggttaatcccatactctttttcctcgcttttgaaattctcaattagtaatgttaccaaaatattaacatatttcccggacagacgcaactgcaaacacggataccttccttttccgccctttatctggtatactgatacagcctgtccccataccggccgggcctcatcagccgcggtatccgtacaggcccaataagcccgggaggaacattatcatgacctatgaacacatagttgccggaacctttgtaagccggcccaaccgctttatcgcccatgtaaagacagggaacagaacagtggtatgccatgtaaaaaacaccggccggtgccgggagcttctgattcccggagccgcggttatactggaattccatccggacgcagctgtttccggaagaaagaccgagtatgacctgattggcgtatataaaaatgatctattcatcaatatggactcccaggcccccaacaaggctgcatgggagtggctgacctcactggacggcagcacggacagctgcggctgtacggaaaaagccggctcccccttttcccctcttggaccttatgtaccctgtgacatacggcgggaggtcacccacggcgactcacggtttgaccttgcattctccctgagagaccgggatacaaaggcagtgtccccggcctttatggaagtcaaaggcgtaaccctggaggaaaacggtgtggccatgtttcctgacgcgcccacggaacggggcatcaaacacttaaagggccttataagggcccatgaggaaggttatgaggcttatgtcctgtttgtcatccagatgaagggcatccgtggctttacccccaatgacatgacccatccggcctttggggacgcgctcaggcaggcccgtgaagccggcgtccatgtgctggcatatgactgtctcgtaacacccgataccatgattgtggattcaccggtaaaggtcattctggattagaacatgccgcaatatacccttttaatgctccgggccagggcctccctttgggaagccctggccgtttcagcattcatgttgaataatataatccccaaacttcaggtattttaagagcggcagttgccgcagttgccgcaattgttccaattaccgcaattattgcagttattgcaggagcagcggcagtttgaagccgcagcggtccggtctgctgcctgggcagctgtccttgcctcagccgactgattacatctgttgttggcatagaaccctgccatatagccctgccagtataaatcgcaggtccggcctgttccgccgcatgacccggcagtgcctgctgcggctgcggccgcagtacttccgcagtttccgcctgcagcggccgttctggcaaacgctgcatcccctgcataataagctccctcataagttcctgcatattcattccaaccattacaattattataattcatagtgttaatctcctttcatctaggttgtactttattatacggggctgggccaaaagtgtgacaaccctccttttattcccacagatacgtactctgcatataatatcataacaaacctgaacggtgattcactatggtctatccgctacatgaactgaaaccgggagaacgggccgaaatcgtctgggttatcagcgaaccgcctatgtcgctgcggctggaagagctgggttttacagccccggcactggtgacctgtattctgaaggggaggcgcggccgcatgtccgcctaccagatacaggacacggtcatcgccctcaggccccaaaatgccagggaagtgctggtgcggcctttgcagccagtttaaacctccatgactgccttaataccggttgtcaaatacacgggtagacttcttctcgcttcttggaagctcgcccagctccaccagcttcaccacaggagtcaggccaatccgccccttaaactgattctggatttcgatttccagggcgtatttgttaatggatggatttgtctccacaaataaggtcagcacatccttgcccatcaggtggtccaccatgacctggtattcgctggaggcaccttctatggagcttaaaagctcctctatctggcttgggaatatgttcacgccctttaccttgaccatatcgtcggtacgcccaatgagggtgccgattctgggataaggcgaaccgcagggacagtctcccggcacgattctggacaggtcgtgagtgcggtagcgaatcaggggagcaccttcctttttcagggtagtgatgacaatttctcccacctcgccgtcaggcagcacctcacctgtcctggggtccacaatctcgatgtatatgtagtcatcccagtagtgcatggctccctgtttctcgcagttaatggcaattcccggcccgtacacctccgtaaggccgtaaatgtcgaacagatccactcccagctcagccgctatcctgttcctcatcttctcgccccagcgctcggaaccaataacaccctttttcagatggatgcgctctccaatgcctctcttggcaatctcctcagccagcaaaagagcataggaggacgtggcgcacaggaccgtggacttcatatccatcatcatgcgcagctgcttatccgtgttgccgggtcccatgggaacggtcatcgcgcccagacgctccgctcccagctggaaaccgattccggctgtccacagaccatatcccggcgtaatctggatacggtccaggtttgtgatgcccgccatctcataacagcgcgcaaacatcagagcccagtcatccacatccttctgggtatagggaatgatgaccggtgttccggtggtgcctgaggaagaatgaatacgcacgattttctcttccggagcagccatcaggcccagaggataggcttccctcaaatcacccttccaggtaaaagggagcttctcgaaatcctcctgggactgtatctgattcacattgacgccttccagcttatgtttgtaaaagcactccttggctgtcagtttcttgagctgttccttaatgagaaggaactgggattctttcatcttcatctggttaatcctccgtttatcttatcatggcgctggctgccgcgcccagcttcagggccttcatattcatgtccttaaacttttccggcactcttttttcaatggctgcctccatctcttccagggaaattcctatcagtccgctggcaatggccgctcccagcagggccacattcatcaccttcggggaaccgcactccatgccaatggacgctgcatccaccaccaccaggttctccccggcatgttccaggtattccatcatctcccggcccgtgtaggcacctcctgtcagggaggcggtcaccggccgtatgggtgcaggggataccaccacacagccgccctttttcaggtaaggcaggcaccggacagcctctgccggttcaaagccgatgatcacgtctgccccgccgtggggtatcagcggagaatatatcttctcaccgatacgcacatgactcaccacgcttccgcccctctgggccatgccgatggtttcagctcccctggcctccattcccttctccatggccgccagggctatgagacgggatgccaggacagtgccctgaccgcccactccgcacagcaatacattttttgtcatcttatatacctcgctctccaagcatctgtcctgtccgtctggagcaggactatttaaccgtttcaatggcgtctacggaacagatctggctgcacaggccgcatccggtgcacaggccgctgtctatgcgcaccatatccccgtccagcaccaatgcgggacagccaatctcattgatgcaggtccggcagttcacacatctgtcctccgaaatcctgcacttccggaagctttttatgatagccgcacagggggacttgaaaataatggctttcacgcccttcatggcggacagcttaagcacggcgtccacacacgcatttaaatccagcgcgtccactgtaacggtattctttacgccaatgccctccagcacctttgtaatgtccactttctccactacatttcccatcatggtacggcctgtacccggatggggctggtggcctgtcatggccgtggtggagttgtccaggatgcacagggtcaggctggcctcattgtataccgcattgacaatacctgtgagaccggaggcaaagaaggtggaatctcccacaaaggaaaaataccgtttgtccggctccacccgctgcagcccctgggccatggtaatcccggcgcccatgcacaggcaggtgtccaccatatccagaggctttgcattgcccagagtatagcagccgatatcgccgcagtaaactccctctatgggcgccgcgccctcccccaggccttcatttaacttctccatggctctctttaccgcgtagaaggatgcccggtggggacatccggcacagaggaccggcggacgcaccggcagcggcggaaccggcagggctgcttccggctccgctgcaccgccttccagtccttccagataccggatataggcttctcccagatactcttccagaacccttctgacagactccacggagttttcaccggcggtctgcacttcccctgtaagcttgccctttacttccagaggcagatggtgcctgccgctaagaagcagcagctcctgttccagaaccggatccagttcctccacagccatcacctggtccagtccttctgcgaattccagaagcagacgctcaggcatgggattgggggtggataccttaagcacccttgctcctctgtatccgttcagggcttccatgacaaacccgtagctgatgccatgagtgatgatgcccttgaccgtgtttccctcttccctatgcagcaggttgaacctgtagcttgaaaagtcctcccctataatgggattgcgcgcctcaatcatcctgtggtttgcatgggacagcctggggaaaatgacccatttgccggaatccttgacaaagccctctggcgccggaagcttgacccgttccttaagctccacgctggcgcatccgtggcatagccttgtggtagggcggaacaacacaggagtatgatatttctcagaatattcaaaggcatccctaatcatctcgtatgcctcttccggagagctgggatcaaataccggaagcttggaaaactggccgaacctgcgtgtatcctgttctgtctgggaagatatgggccccggatcgtcggccaccactaccaccatgcctccctttacccccacataagccaggctcatcagagggtctgaggccacattcagccctacctgcttcatggtgaccatggtcctggctccggtgtatgcagccgcggccgccacctccatacctgccttttcattgacagaccactctacatagatatctccgggattatgcttggccaccgtctccagtacttccgtcgagggtgttcctggataaccggaaaccaccttaactcctgcccggacagcgcccaggccgattgcctcatttcccattaaaaatgatttggacattccccttctccttcccaaccgtgttttgtttgtcagatatacgttcagacaggctttagacccttctgatcccatacattctgttatgttttggtatcattatacgcaaaaaggcctgtcctttcaagaaaggacaggcctgaatcccaaaatgcctgtgatgccaccttaactttttaatacgctctcaaacatgcgcggtacaacggtacggtacatgctctgcccttaacgcaggcctgcggtccggatacttggcgcgtaagctgtcagctgacggcctttcccctttccctcagcggtccatttgccggccggcctgttacagggattccaccatcccctgctctctgtgaacgccctctacggtttgatctccgcttcaacggtttatttcaatccccatcctgagtatagtacggctcagaatgccccagcagacaggctgctgtttaagattcagcttactagatattatacaagttttcccgcagatgtcaaacattttttagcctgaatctactgatcattggtaagcttaaagtaatccagaacataaaataccagacttaaaatcatgcctaccacgcaggccagcaccataccggtaagctgcacatttccaaacttcacggcaattcccgacagacccgtgacaaatatgactgaggtaagggccagatttctggaatttccgtaatccaccctggaatccaccagaatacgcagacctgaggtaccaatcataccgtaaagcaggaaggaaataccgccgataacaggaccgggtatggtgctgataagagtggagaacttgccgataaaggagcacacaatggacagcacggccgctcccgcaatcacgcgcacgctgtacacacgggtgattgccatgacgccgatattctctccataggtggtggtgggcacagagcctatcagtcctgatatcatggtggaaaaattatctccgaacagggaacggtgaagacccggatcctttaacagatcccttcccacaatcttgctggtgactacctggtgtccgatgtgctcagaggtgatgaccaggagcaccggaaggataatcatgatagcctccagattaaacttaggcgtgctgaaattaggcagggcaaaaacaggagccgctgccacctcggcaaaatccacgatacccgcggcaagggcagacgcgtagcccacaatgaccgctatgaggatagggataaccgagaagaactttctgaacaggatggaaccaaatacagcggttcccagggtaagaacaaacacgattgtctttctggggtccagcacctcgtccagaagccctgcattgctggcagctgaaccggagagctccagtcctatgagcgccaccaccgggcccatggctgccggcggaaggaccacctcaatccattctgtcccgaatttatatacaataaaggccaggatacaaccgcagaaccccactgccacgaatccacccagggcatattcatatccgaaattactgatgaccacgcctgccggcgccagaaatgcaaagctggatcccagataggccggagcctttccctttgtcactccgataaaaagcagggtgcccacaccgttcataaacagcaccacagccgggtttatgccaaatataaacggcaccaggatggatgcgccgaacatggcgaacatgtgctggatgctgaggggtaccaacaggttaaagggtaccttgtcctctacttgaatgatgcgttgattttccattgttttcctcctttgttgtccacttgtttcatactctgtttcctgccgcgcgcctccgccctgagcggttatgtccccggcttatcttacccctctcaaaacaccgttcgcagatggagaacggataatcccatgacagctccttcccgcaggctgaacatttacgggtgtagctggcacattctgtccttaaaatacggctgatttcctcctctgtgctgcgtctctcctcggccaggttctcggcctgaacaggaagccccacctttctggagaactggaaataaagatccagcatcttatagtagctctccaaatcatacaggtcctctcccgggctgtaaggaaactccagttccgtcacgtcacggtattccctgcagtaatccttccacaggtccatgaccatcttattgtctatgtcaatggaacaggtgatgagcttataaatttcctgccgggagtattcccccatatcatcccggtgtacatgctcaaaactcatatacagcgccagcagctcgtccacctccatcttctcataaatggaaggcgtgtccatgccggcccatatcttaaccagcgtatcaatctcagcaggaaggttgagaagctgctcagggaatcccacatatgccttcataataggcatgggcattctggaaagaccgtcctcgatgacctccggctcgtcgatggcagccacgaatccctcgtcgtaaagaccgtatcttccggcccgtccggcaatctgttttatctcctccggattcagggtacgcttatttaccccgtcaaatttgcgtgtttccacaaatacgattctgcgtatgggcaggtttagccccatgccgatggcgtcagtgctgaccaccacctctgtctccctggccaggaacctgcgcacctgttcacgcctggtggcgggaggcaggcttccgtaaataacgctgcagtggattccctcgttctccaggtgggctgccagggccagcactgattttttggaaaacacaatgagggcatcgcccttttttaaatcctgtttcagattatagggctttttctccatggtcagccgggtgttccgcttatggcgcaccaccctgtactggtcgccgcaccgcttaatcatctgaaccacaatatcctctgcctcgggagccatgcacaggtggatttcctctgcccgaagccccagcactgccctggtccagttatgtccgcggtaggggtcggctatcatctggcactcgtccaccaccacgatatcgaaatattcatggtcgtttaacatctctacggtacaggactggcagaccgctccaggcacctccagcgtctcctcgcctgtgaccatggaacaggacaggccctctgtgttaagcttgtcatagacctccagggccagcagtcttaacggcccgaagtaagctccatgcctgcactccttaagacgctccagcgcgtcgtgggtcttgccgctgttggtagggcccacatgaaggatgaacctgcgtttcatctccctggcccctgggtattcctgctccggcttctgtttcacagactccaggatccccttcttgatggttttcggaatgtagaacagctggtatgccctctccagcgaattagtgaggagataacggcggatgccctgcatcttcagcacctgctccaaatcctcaagggacaggccgtttacatattccaggtcctttctggcaagggcttcacagaattcattcatctgacggcatccggactcccactgctccagggcaggccctgtcaggtgtccttccctgcgcatgagataggcgcacacctttgacagcatggcgtggacatcgctgagttcgttggacttcaccagcggcttcaggttggcctcggtcaaccggctcatgcgtttcctgagttcggcacctgtcatggcccggtagcgtttgttcacattcccaaagaacaggccctggtaatattccgccagatactgctcgcactccttttttatctccatggatttcctctttcttccaaatattcgtaaaagcagccagacgcatatgtttccatatccatctggcagcacattataccatggttgtatctacaaaatgttcaaaccccgatataccatattctgcacacacgctgttgattccatccacgatttcctcccgtgagtaattggcggtgtagagttcctcatccttcagctggttgaggtacatataaaacgtgagggccatctccagacagtccaggctgtccgtgtccagctcgtcggtaagaaggttctccgcgtcattgatatttccctcatccaccagatccttaagccgcttatatacccggtcaaggtccgtatacttgtcctcatcctcgggaaggtcataatcaatatcgctctttccaagaaccagcctggcaatcgccctcaccagatcgctgattgttctcataacataatcgtcctgatatcccatgtcatttcatctcctgaatttagtggattctgttttttgcacatttaaacttagtatagttgataacctttcctccgtcaagcagtctgtggccacaatgatgaaccaatggcagatagggacctgactgccatgcaccaaaggttttgcggcacatacgctatcctaagactcaatctgcccgactataggcagattttatatttcaggagtgactggatggaacacccacattttatcatcgcttttaccggtaatgaacagaccggcaaggaggtcttgtttaaaaagctcactgcccaaaagggccctgctatgccttcctgtatgcgggacatgtcctgcccccatggtgatttttcatatgacagccgccgctataaggcagtgaaccttcccggggtcctgtccctcagctccccgtcagaggaagccagctgcacggcatcctatctctgctccggacacccggacgccattctggtgataggccacgcgcttcatctggaaatccttctgggacttttaaaagaaatcctgagtcttggaccggtcagggactcctccattcccgttgtcctgtgtgtcagccgctgtgaagaagccagacggcagggcatccacattgatttttcacttctccacgatgtactccagattccggtcgtccccctccacggatacggcagggaacagatggacgacttaaaagcagccctccactatgctctccagccccatcacaggcacgattttctctacgactgtctggacttttctccctgccgcctggctcatgagtgcatgatgcctgaaataagcccgtctcagggaaaaaagcggaatataagcccggaagcaggatggatccgaagaatatgtgaagcgctgctgctattgctcttaattggacttaccgcctgtctgtccatccggcttacagactgtctctggccgttattttttgaaactgaaaccgtcctgtgggcctgggcagaatggtttggaatacctgcctggctggctgcccccatggttcatggagcatttcgcgccgtgtcatgcaccatactggtaatgctcccgatgctttttctgctgtttcccctgttgggtttgctgggaagaagcagctgctttccctgggccgtatatctgtcagacctgctgacagagttttttattgaaaaaccttgtaataccgccagccattacaagtcatacggtatcttttccacccttttctcaagtaccgcagaccacaccattccggtccttgacaaggcagcggcggcagctgtcccgtccggcattctcatatggtttcttggcagcatggcatatgccggaccggaaacaggttacggcaccctactgttttcggatatagccggagggaacctgttaactgccatcacacattttcttgagcatccggcccgtctccttggactggacggcaccatactggctgcttttatcctgggtattttttcccatggaatggcgcttcccgccatgatgatgatatatctgaaaacaggaggaatcccttccccttcatcccccttcatcctcggacaggtgctggcaaatcacgggtggacctggcgcactgccctgtgcacctgtctcatggctctgacccgctttccaagcatcactgtctgtctgaagatgcgcagaagacccggccatactccgtactttttttgggggcggctgctggtattcattctcggtatcaccctgtgctttctcatagctttgacaggcagaatatccggctgacacctgcgctcccatcataatgcagcaatccctttccctctcataaaatcattccccggaatatggctctgccctagaaatatcttccagtgcatgtcccccattttctggggattctttcttgactgccgtgtctcctgagcctataatggaactaagcaaacaacaggatacatatatggacattcaaaaacgcaggacattcatcatcagctttatttactttggaatcataggtgtgctctgctatatagggttaaagaaactcctgcccatactgattcccttcatggccgccatggctattgcagccatgctggaaccggcagtgtctctactggacagacacatgaagggcggaaagggcgcggccgccgcagttgtgctgctggtcttttatggttccattctgacaatcatgtgcgtgtctggcagccaaatcctgtcatccatccaggaacaggcaaaaaagctgcccggcatctacagccagaccatcgaaccaggtctgtcccatttcttttccctgttggaaaacagtttccccggacacagcatccacatatcagcccttggacaaagcctggagcgtttcatggaaaatgcttctgtgggcatctcctccggactgcttgggtggggcgcttctgccataagcggtattcctgccctggtccttgattttgtcatcgctgtgatcgcatcttttttcctgacaggcaattacagggagacgctggatttcctgctgtatcagattcctgatgacagacggcaaatgctcttacaggtacttctccatatccgtaaagtcgcctgccggcttctgcgggcttatgcgctcctgatgctcctgacatttacggaactttatatcggtttcctggtgctgggcattccggccggattcacgcttgcctgcatcacctcgctggtggatattctgccggtccttggcacaggcaccgtgcttcttccctgggcattcatagcctggacgaccggctccggaagcctggccatgggtcttgtgtgcctgtatctgctcatagctgtggtccgccagaccctggagcccaaaatcatcggccatcagatgggcctgtcccccatagccaccctcctgtgcatctttgcaggcggcaagcttctgggcctgaccggtatattcctgttccccatagccgccaccgtactggccgaactgcacagcggaaataacctccccgcccagaaccaggtttaacctgcagcatcccaccaggcaagaacacaaccataccccaaaggcaggtgttgtatatgaagttcttccataacgttacagccaagattgcgccggcattttcctctaaagccgcattaaaatccaccgccccccagaacaaggcgcctgaaaggacagaaaagaaggtccgttcttttagattttttgcagccggcctggttctggccgctgtctccggcctgctgggactctgtgcccggacagtgcccgggttcgcccagttttactccgtcgccgtgtacccgctcctggccggtacattgggacggttgtgcagcctgtttccattttccctttccgaaatcgggctgtattccctctgcctgttctgcatatgctacatgattctgcatatcaggcagcctgttgtggtgttctcccgtgccttttttctttgctgtgtcctgttattcgtgttcaccataaactgcggcatcaactattaccggaaccccttttcctatgaggcaggcattgccgcagaaaaaacctccaccgaggagctgctggcgctgtgccgttatcttacaaaccaaatcaacagctctctgacagaaatagaccactccggcgaaatcctggacggcctctacccgggacagaccgaggcaacccccgcgccatcagcccgggagctttcaaagcttggaagggacggcagggcagccatggtccggctgggccagtcctatccccagctggagggttattatccctatccaaagcctctcatcaactccagactgctgtccgtgcagcagctctgcggcatttattcccccttcaccatagaggcaaactacaacagggaaatgccttactataacatcccccataccatctgccatgaattgtctcatctgaagggatttatgcgggaagatgaagccaacttcatcggatacctggcatgtatcggatccgattccccggactttcgctacagcggctatctgaccggctgggtctacgccggcaatgccctggccagggtggaccccgaaagttattatgacctttatacaaagctgtcccctcaggccgcccaggacctggcctggaacaaccagttctgggaacgctttgaaggacctgtggcagaagcctccacccagatgaatgacagatatctcaaagcccacagccaggaggacggcgtcagaagctatggacggatggtggatttgatgctggcatattataaggaccaattaagggaggattaggttaaatcctccctttctgcttatatgccgtcctcccctcccagtccccctacttcctgcttgtggttcatcatcaatgtctccacccggtacagatggttgtacatggattcataggcgcgctcgccattcatatccaggatgttttcatatatctgtgtatggtatgacaccacctcatcccgtggagtagtgtatttcagggaaaggaactgatggttggctgtaatatagggtattgcatccaggcagtccacaaggagctggttgtgggatgcctttgctatagccttatgaaaccaggcgtctgcttcaaaaaatgaattgttctcctttgccttcagcttacgtatctggttaatgctgtcgaacagagcattctgaagttcttttatatcatctgccgaccggttctgggccgcctctctggctgcctgggattcgataagtcttcttagtataattgtctcctttaataacgtaacattttccataaaaggtgttccataggatgtgtctgacagggtgctgccggatgatatcaccacggtcccggaacccgccgatgtcctcacgattcctgcgtctgccagctgtcttaaggcttccctcaccggaatgcggctggtatcataatagtttgccagttcccgctccgtgggaagcttctgatttgtccggtattctcctgttaatattcgtttctttagatcttctaatatgacctcactcaatttttgtcttgccatcaattcgcccctcccggtatatttttaatcccgcatacatgtattttggtatatattataccattatatctcttaaattcataccaatatttatattttataccaatatatcattttattttgtataacttatatactatccggtctttttatctttaatatattgattttttatacaaaaatatatatgcttttggtataaaagcgcgcgaaaacacatgaaaaggagatacaatgtacagggaatttttaaaagcaaaagatgatttcttagccgccgcatcccgcacatacgagagcaggattcaaaccggaaccggcggaaacctgagtgtccgtattccgggaactgacctgatgattgtcaagcccagcggattttcctacgggcagtgcagtgaggagaatataaccataactgatttccagggaaaccttcaggagggtctgtacaaacccaccagggaatccacccttcacggcaacctgtatgcccgataccccaaaataggaggcattgtacatacacacagcccctattccatcctcatttctctgaatgacagacagctggaattaatcacccttcattcccagctcaaattgaaaaaaccggtcaaggtagtggatgtcaccacccaggccgtaactcaggaggaactgcctaaggtgtttaaagttctggatacagagccggagaccgctgccatcatcttaaagggccacggcattgtcgccatatcgtccagtgcagtgaaagcagggcagatcgccgaactgattgaagaaaccgctatgattgcgtgggaacagaaaaaactcagaaagtaaaggagaacagatatgacaaactataccatcacacctattaatacaggattcaccaacacaagcaagggccagtacttatatcaccacagcgtacacaaattctatgatgtggagggctttgtaaagctccctgtcactgtatttctggtacagggcggcggaaagaaaattatgatcgatacaggaatgtctgatacagaaattgccggaaaatatcaccatcccggctctgtgcagccagagggttatgctgtttatgaacagctggaaaatctgggaatcaagtgcagtgagataacggatattatttttacccatctccactgggaccatgtctattatctggaccgctttgtaaatgctgatcttcatgtccagagaacagaataccagtttgccgtaaatcccattcctctttactataaatcctatgagtatccggttctgggactgaaacctcagtttgacggcagaagctttaagctttatgacggggaggcagagatttttgacggtatcagcgtataccccaccccaggacattccgttggtcatcaaaccgttgtggttaataccagcgaggggcagtatcactgctgcggcgaccttatctttacctatgacaacctaaagcctgtaccggaaatgcattatgacatcacacctccaggacgcttcttagatatcgtggatgaatggaacagcattgtagaactgaagaaacgggcaaagagccaggaattcatccttccaactcacgcgcctgagatgattgaaattgtagactcaaaaagagtgtacggaaattaggaggcagcatggaacacaacagaatcgccctgatagcctctcttgataccaaactgcaggaaaccttatatgccaaacatgagattgaatcatgtggaggccagggactcataattgatatcagcaccaaaaccctggtggacgccggcgatgcggtggggcctgccgatatcctggcccgttacgggatgacctgggaagaattcggtcccttagataaggcccagagtatcgaaaccatgtcaaatgccctgaccgcagtcatgcctgctttgtatgcggaagggttatttgatgccgtcatttccatcgggggaggacagaatgcccggatggctgccgcggccatgaagtccctgccatttggcgtacctaaaattgtggcctcttccctggcctgcggcagaagaaccatggaacaatatgtgggagacaaggatatcatggtcgtccacacggttgcagacatttccgggcttaattataccactaaaactgtgattcacaatgtctgccacgctgccctgggcatgctccaacaccaaaggcaggtgactcctgattcccgtaaaaagattgccgcaacaatgcttggaattacatccaaaggcgttgagggagcactgcgcctcctgcctgacggcacttatgaaaaaacctgcttccacgccaatggtgtaggggggcgctgcatggaaaaactgattgaggaaggtgcctttgacctgattgcggatataacactccacgaacttacctgcgaagtcctgggcgggtattgtaccggtgcaaacaaccggctggaggcagccgttaggcatcacgtccctatggtcgtcgtgcccggtgccctggacatgcttgatttcttcattgacgaggacgggcggggattaccggatgatattgaccgcagaaagaaggtctatcacaattcaagtatcgtccacaccaaaatttacagggaagaggcagtaaagctggcccgcgtcctggccgggcgcctgaacaaaagcactgcccctgtaacccttatcctgccggatgaaggcttctgcgaggccgcggccaaaggcggtcccatgtatgacccggaggtggatgaggcctttataagcaccatcaagccacttctggaacagcatataaaaattattgaggtaaggggtaatatcaattcggacagctgtcagaaggcagttgccgcagctataatgaatcttgtataggagggtggatttatgactacaaccataagcgttgccggtttgttcctggcgctgttcctgctggtatacctggcatttaagggacacagcgtaataatcatcgcaccaatcgttgccatggtagctgtaattttttctgccggctttgactcccatctcatggcaaattatacggaagtttatatgaccggttttgcaaactacgcaaggaactatttccccttgtatttatttggggctgtctttgcgaaattaatggaggtaagcgggtatgcggatgccatctcccatcttatcgccagcaggcttggcaaggaaagagctatactggcagttgtcctgtgctgcgcagtccttacatacggaggcgtttccctctttgtggtaaccttcgtggttcttcccatagccatctctcttttcagggcggccgacatccccaaaaggctgattccaggttccattgcccttggggcatttacctttaccatgacagctcttcccggctctccccaggtacagaacaccatacccatgacctactttggcacggatgcatttgccgctccggtcctgggaatcatagccgccatcatgatgttctccctcggcatgatctggcttaactaccgggccaaaaaggccaaacaggctgaggaaggatacggggagcacgacgatgaaaaaaaggaaatatcggaatccgatctccccggcatcatccatcctgtcattgccttcctcctgattgtagcggtcaacctcttatgctccaaggtcatatatccccgcctgaacacagcctatctggaacagtacaacacaaaaatcagcgctgtctccggcaattggtccgtcctgattgcattgctcgttgccatcatttacctgattataaccggtctgccccgctttaaggcattgaaggacagccttaagtcagctgcgggcaattctctgatgccccttattaactcctgcgcagttgtgggctttggctccgtaatcaaggggctggccatctttgccattgtgcaggccttcatcctctctatatcagctaacccgctgattaccgaggtcctggctgtcaatctgttgtgcggcatgactgcatctgcctccggcggactgggagccactttagaagcgcttgcccccaccttcctggaacagggcgcccgcataggaatcggcccccaggtactgcacagaattgcttccatctcttccggcggcctggactcacttccgcacaacggggctaccgtaaccaccctgtccctgtgcggcatcacccacaaagagggatatctggacatgtttgtcacatccgtggtcattcccattgccaccgcgcttgtcattgtcgtattagcaactttaggtctgagattttagagcatgtccgggagatatcactatgaaaaactatttatctgagcaagaggcgcgcagggccatcctggatgtgggaaaacgcatttatgacagaggctatgtggctgccaatgacggaaacatcagctgtaaaatcagcgacaccaccattcttgtcacgcccacaggcgtttccaagggctttatggagccggattcacttgtaaagatggatttaggcggaaccatcctggatggaggaaaaccgtcctcagaagtgaaaatgcatcttcgggcctatcaggaaaatcctgacataaccggggtggttcacgcccatccggcagctgccaccagcttttccgtcatgggaatggagatgaaaaagccggttgtggcagaagccgtactggtaacaggcaacatactgattgccccctacgccaagcccggaacttatgatgtacctgacagcattgcgcctttcatcaaccgttacaatgctgtcctgctggcaaaccatggggctttaagctggggaaaggacctttaccaggccctttaccgcatggaagccctggaacaccaggcgggtatcctgtttcgcacccttattctggcccatatcaccggccgtgatgtcccgtatctatccggggaagctctggccgggctggtacaaatccgggacgaaatgggtatactcaccgggggaattccggagaattaatgtttccggctccgttcaaacttcataccttcataaatacggaccggatttccccgctccagccttgcgtgttccatccacgcaaggcttttttccttttgctgatttatggcattcatttctgccagtatgctgcacagccggtccatggcaatctgcttattcatgtgctggctcctggcctgggttgacaccacggctgtacccgtgggaatatggatggcccgtacaccggtctccaccttattcacatgctgtcctccctttcctccgctgcggaaggtttcaaaacgcaccattctttcctctgatatccttgggacctggtccagtatgctgacatccacataccagttcttcctcctgtggccgggacggtagggacttttgcaaatccactgcacactgccctccagctcccgtaaatcccggtccgtctcaaacaccacagatgacatgcagccaggcttctttccgggggtacagcctaccaggcgcacatccccggcttcccttctcagttcctcatagagcatagccactgccagctcgcattctgccggtccctgaccggaactaatctgtactctcatagtctccctcctatcctttaaacgtgatcaggggacgcagggtggctgctatgtcaatcagtccgtactcctgcaatacccccatgacctgctccacatttttatatgcctccggcgcctctgcgaacagcaggttggtatcgtggcagaccacacggctcttaaggcctgtgcaccggatagaatcccggtcatatttttggtctatgcggcttttgcagatacttctggcccattttcttcccgcgccatgagagagagaattaagtgacaccgccgtatcctcccttgggatgcacacataggtcaggcttccccttgaccccggaatcaccactgctcccttagaggctgatacgctgccctttctgtgcagaaggccgtcctttgtccgttccagataattatggcagctgtccatgagaagctccggctcagaggcgcctcccagccacgcaagcagcttctgcgccgctgctctccggtttctcactgcccaccttaaagctctgtcatgctcagccatataggcctctgcctgttcagaaccatccgcaagcccctccggcacccaaaaccgtgacaggatctcctgtccgtatcccctggatccgcagtggaccaaaagcagaatacggtccccacaaagccccaggctcccggctgcctcctggtcataaatccgctccacacattggaactccgcaaaatggttccctcctcccagggttcccaagtcccgtatagggcactcctcctcatatgggttggaaaacggtatatcctccagctcccggacggcctccagccttgatacccatttctcctgtttaaacttctttttctttacccctgtgtcaaagaggctcataccgcagccgatatcatttcccagtaaatggggatataatactcccctgctgaggacagctgttcccacaggaatccgcccgggatgcaggtccggaagccccactgccttcacaacgccaggaagcctgctcactgccaaaagctggtcctttgccgcctgttccatccaattcttaccgctgctgattaatatgcaattttctttttccaaatcaaattctccttcataagccgacagctcagcccatacttctgtcattttccctaaaaaagggtacaaaaaaacacgacaccaagccgtgcgcatcaaaaaaacatagtatgccgcttcctgtcctactgtttcgttatactgttttcacctctgctttatcattacgacttgccaacataacaaccactcctttgctcatgaaggatttgcttccttcgtattctgtattatactataatcgtaacccggcaaaatgtcaatcccgtaatcatcccggaattccatcgtgctttcatcaacacggaacttttatatcattgcatataccagggtatattaatgattgtgacagatgcagggtactctgcccgctgtaatttatacagggcaggacttaagcagttttcaaatacgctctgtaatcaagcaatcaaggaggaataaagaaaaatgaaaaaaagtaaaagcccggcggagcaaatcaccgcagcccgggcagtctcaccacggaaagccctgaccctgacagccgcggtactggcagccgccattactgccaccggatgctccggtacaggccggacagaaacagaaccggaaagccaggctgaaatcacggccggacctgcagttaaccagcctgaaagcccggagcggccccatggaggccaaaccgtccaaggcccggcagcctatgtggatgatttttatgatgcggtaaaccatgacacacttaatggctgggaaattccggctgaacaggccgatatgagctggttcaggaaggcgcgggaggacaactattccaaggtaaatgacctgattcgccaggcttcatctgaagcaggacaggcagagcaggaagcgggaagcgacctgtataacatacgcgccctgaatctgaccggcctggaccgggagaccagggacagggaaggatacggccgcacagccggagcatttttaaaggaagtagattcatctggttctgtctctgagcttttaaaggcatgcctccagttccagagggataccggactgttcagccttatgggctggtattatgaaggggacagcggggattcctccgttaaagtcctctatctctcacagccggattctggtctcaggagggaagtctggttctccgaagatgcatccaaccagaagcgggtggaggaatacaaaaaatacctcacaaagcttcacgaaaataacggcctgagcccggaggaagcaggggtgaccgttgcccgggtaactgatatgatgaaagatctggcgtcctccacccttaagatagaggaggtctatgacccggaaaaaacatacaatgtctgcacggccggcgaggcggcaaacctctattcctcggctctgcccttccgccttctaaacagcattttcggcatacaggaaggtgaaaagacagttgtctcccagccggatgcctgcaggaagcttggaagctatctgaaggaagaaaaccttcccctcctgaaagaatatgtcaagacatgtctctattcagatctgtccatgatgacagacaccgcttccctggacgctgcccaggagtatcagacagcagcaggaggtatagaaaagaaaaaggattttgagcggaccgtatctgaaacagtccaggaaaaacttggtttccagtgcggccgtgtattctgtgaaacctattttaacgaggacgccaaacaggatgtggcttccatcatccggcaaatcatagatgtatacgacaaccgccttgcccatatggaatggatgacagaatccacccgtcaggaggcaaggaaaaagctgaaagccattactgtcaaggttggttatcccgatgaatggccccaggacaaattgaacctggtactgaaatccccggaccagggcggtgtctacatcgacaatatcatggaaatccttaaggcatcccaggattactcctttaagaccagacacgacccggtggaccggaatgaatggagcatgacgccccagacagtcaatgcctattataaccccggaaacaacgagatcgtgtttccggccggaatccttcaggccccgttttatgacccgcaggctgagcctgtggccaacctgggtggaatcggagctgttatcggccacgaaatcacccatgcgtttgacacaagcggatcccagtatgatgaaaagggaaacctgagggattggtggactgcccaggataaacagcatttcagggaattggcccaaaaggtcattgactactatgataccatggaagtaaacggcatccaggtaaacggtacgctgagcgttacggagaatatcgctgacctgggaggtgtttcctgcataacagaaatagccagggaaaagggatatgacctgaaggagctgtaccatgcctatggtgtcatatgggccacaaaatacagggatgaatacctttcctacatcatgaccaatgacacacattcccctggcatcaccagggtaaatgccgtactgtctgccaccgatgacttttatactgcctttggggtcagggaaggcgacgggatgtaccgaaggccggaggacagaccccatatctggtagaaatatctatatatataaaatgtcagagtccgggaagcatctgcctcccggactctgtatctgtattgccatgattactcttctctctttttcctgacaagcagccagataattacaaacccggtacataaaatcataacctgaaatacaaggatgacgcagatgcctgccagcaccagaaagcccgcagcccttaatccgctgccagagcttccctcagagttcgttcctgcctggtccgggtcctcctgtgacgggatatcctgtgatgggttctcctgtgacgggtcctcagctccctcaccatcctgatccagtccctggatcctacgcacatcccctgccagggcttccagctccccgctgtcaaacacatccctcagcccgcagcggtacatggtgtcgcggtagggcgcatccagaccttcattcaaaagtcccatatacgtatccacagcgccgtcccagtccctcctggacatggtccagagatcaagggccgacagagccgaggttccatatcccatatagtacagggggctgtaaaacagatgcgacacatccacccagtcatagcacacgccctcgtcgtagacatcaaaataccatccatgataggaatcctgtatctctttgaatgtgcggttcatgtcctccagactcatgtccggatccatgtaaacagcttcctcaaattcctgcagcatgcaggacataatgatcacatacagcatatccgtaacagtctcaaactcaaaggcctctgccccttcgccaaacatatcccccgcatactggttgaccagcatctccaacccctgtgactggacctcgcacacatccacactgtaaccctggaacagttcaggcaccgaattataataataggagctgaaatgcccgaattcatgaatcagggactggtaatccgtaaatgtatggtttctgttgatgaaaataaatgcgtcgccatagcttggaagccctacggtataattattatccatcctgtcctgtccgtcttccccggactggatatcatacagctcgttgtcctgcatataccggaaaatctcacccagctcaggattcaccgatccgacagcccttccaacaccggccagtatgtcctgggcggaactctcttccacaaggtccagggagtcataggattcctgggccacatccatataccagatgtcattattaaggggaacaatacgggtctttacatccgagcaaagcccctctgcgtcctgaagggtatagtcccttccgtaaacagcctcaaaggaataacgggcatagttgtcatagcctttaagctctgctgtccggcggcgcacctggaccagttcccggaacttgctgcccagaacccggttcttttccctgacaagtgcatcctcaatctcagcgtactgcccgtcgtcaaggtccggttcccgttccagccggctgtagctccactgtccgccctccagctccaccgtaaaatcgccggaagccagtttgtcatactccctgagaagctcctgctccctccggttcagttcggtcagttccccggaattttccctgtaatattcgatgtaaggcgcatattcaatccccatcttatctgtcaggagttctttataggatgagttcatccccttcttaaggcaggctgcggccttatccccatctcggagtagatgtccgtggtatatgcctgttctgcggcagcctgctcatccgacacgtccctgtcatagttcagctgggccatataagtcagggtagccagacggtcatactcatccacaatggcatcgtatagcctcagcacttcctcttcccggccttgcgaagcacaggcctgttcaaaatcagccatggcctgttccatggcagccgggtcatagtgctcgtatggcctccgggaatagggaacggcttcatggacctttccgccggctttgctgacatattccggttcccgggccctttcccgggcagtcaggcttccctgagacacgctgcaggaggtgatcgtcagtgacatcaccaatgccaggaccagtgctgccccgcgccttagactccttttccacatttcgtttttcacagcaggccctccttacatattatggtatatgcctattgtaacaccccggacgttttaccgccagttgatttaatgtctcatctccggtccatggtccatgctgcctgcctaatctccggttatccatccttcctcctccggaagcaggaaatagttattatccctgtccgaatcagcaatcatggcgtccagctcccggatcagatagctgtccggcatgtttctctcccagaaccggtatcccttggtgctctttatacctttgacgtcaatttcccgtcctgcatagtaatcaatgtatacccctgcataggttgctgccatggaatgttccacgtctgcccccagatttttcacaacaccccgtatctggtcgctgatcagcttttgtatgtaccggtaggaccagtcttcaaaatccagcaggtccggattggtgcttccgtttttctgtgcccaggcagatacatccacagccctggtggcataggaaatacttccgtcctcctcccataacacctctccatactggcagggcggtatgctgagggcatctgtcacgatttcctgtatgccgtaatttccttccggaactccgggctcgctcttatgcttgcggatacgctgcacatgcaggtgtccgctgaaaaaaagcgggagctcatatttctgaagaagggaaatcacctctttgttgttgtccatggcgcactgggtggtatacatcctgctctgggccagcagattatggtgggcaatgggtatcacaaacactccctcctcctttgccctggccagctgttcatcggcccaggccatggtgctgtctttcagtcttccctccaccttgttatccggctcatattggcaggagtccagcatcagaagccagtttctgtcatccagggcgtagacatagctcagtgagctgtcgtcccggctcagtgcctggtcataaccgtattcatggtaaatctcatggaattcaggtccgtcaatatagggagccggctctttccgggcgccgtagtacaccgaagcgtcatggttattgatatcatggtttcccggtatcaccaggacctgtatgcctgcgtcctggacccttttaagccttgccgccagctcctcatggttcagccgctccccgttcatagtaatatcgccgctgagaaccagggcagagggccgttcctctatgacctcgtccagaaatgcttccaaaagctcaggcagatactggaccacctttccgtcactccgctccacaaacagccggaaagcttccccgccgtctccggctaaagcgctttgatagtgaaggtctgttgccaggatcagcctgggcggtatgtagggttcctcaggggcttgcggaggagtccacataccgggaaatttcttcttccactccttatagccctcctgcctgattacttcatcctggggttcctgtgcctgggaatccgtagccaatgccggcccggccggttcctcccattcctcccctgtctttgcttcccgggtgccctcaggccccccgctttccctgctctcaaccgatacaggccctgaaggctccattaaagtctttaaaacgtgcagtaccccgaagcatgccataaataccatggcatacatcagggcacttatcatccaggtctttctcttcatgcagtctgctctttctgtattaactatcgctgtgttatattatgcccagttccttcatggcatacgcgattccgtcctcctccacatcctttgtctcaaacgtggcgtagggctccagaacttcgtcatgctttcccatcaggatacagttgcttgcgtagcggaacatggcaaggtcattgccgctgtcgccgaacacataggcatcatccagagagatgccgtaatgcttcaataccaaatcaatggccgttgccttggaatgtcctctgggcacacattcatattccccgtttccgcggtctatgatttccatgtccctgagccgtccgaaaagctccttgggcctgctgttttcacccgagataagataaaacttatcatagtcatagcagtcgtcctcccagtcatattcagacacacagtccgaacgcctgagcgacgccttcatctgctccacccttggaataggtgactgtgacctgtggatgtggattccgtccgacgcctcaagggctccgtccagtccgcacgcatcaatatggcccttgatttccagccctctctcatgaggaatgtggtagctgtacatgaccctgccctctgcaaggatataggttccgcagccgcacagatatccgtctgcttccaccagcttcttaatttcgcccagatgggcatatacgcggcccgtattgatgaacaccagatgtccttttgcgcgcgcctccttcagtgcctgtaccgcactttcgggaacccggcccgtcttttcagacaggagggttccgtcaatatcataaaataaagctttcgttctattattcatcatctctgaacacaatggtctgtgcttcctcgtccatgctctccacgattgccagtgactccagtctgattccctctgaacgcagcaggtctccgcctacctggaatcccttctcgatgacaatgcccgcgcctaccagttcagcgccggaatcccgtaccagggcagccaggccctccagagcctttccattggccaggaagtcatcaatgagcagcaccttgtcgccggctcccagaaactctcttgacacgataatatcataaaccctgccatgggtgtaggactccaccttggtggtataaacctcgcctgcaatattcttggtctgtgtctttttggcaaatacaaccggcacatcaaaatactgggccacaatacatgcaattccgattccggaggcctcaatggtaagaatcttggtgacctccacatcggcaaacctgcgcttaaattcttttccaatctctccaaaaagcttaatgtccatctgatggttcaagaagctgtccaccttcagaacgtttccggcttttatcttgccgtccttgcgtatcctgtcctttaaaatctgcatgtacgagtcctccttcttcttttggcaatccttctttactgtgcggctgtggtctctgcggctgtggtctctgcttctgttgtttcctctgcggcagcagtttcccctgcggctgttgtctcctcagccggagcagctgcgtcctgggcctcgttgactgcgttgtccgccatgaacttcataaccttctggttcagggccatttcatccagggtctcctggccgaaatattccactgcggcctcaagagtctggccgttcatctccgcaaatgcctggcggtcagcatcctccagggttatgccctccagctcggcaaccttaaggataaccagctggttcttcacatcatccttcactgacgcgtaaacagcttcctgtaatccgggcacatccatgccattggccttagccatgccggacaggttggtgccgtacatcttagcctgctcttcatactgcttgatgcggtcattataacgtctggaaagggtgttcttgttcagcttgaacttggagttctcaaccacattcttaagtacatactgctggatctgtaggtcggcagactgctgcttctgctttaaaaggtcttccttaacactggccctgtactcatccactgtcttaaaatcagaaacactctgtacaaacgcgtcatccagtacagcagactgcttttcctttacagcattcacagtcacctcaaatacaacgtcctgtcctgccagggctttctcgctgtagtcctcagggaacgtcaggttcagttccttcttatcgcccttctttgtgccaatcagtccgtcctcaaatccatcgatcatcctgccggatcccagggtcaggtcctgtccttcgccggtgccgcctgcaaattccacaccgtcctgttttcccacataatcaatgttgacaatatcgccttctgcggcaggcctgtccacttcctcaattttaggattctggctgagtacctggttgatttttgactccacctcggcatctgttaccatgacagccggtacatttacctttacgcccttatactctgacagctctaccgtgcccagattctcctttccttccgtctggctggccccgcagcctgtcatgatggaagctgcaaccagtccgcataaacatatgagtgctaattttttcattttacatatcccttttctatcctgatttcacacgcaggaccttgaattatccttatttttccattcatccccaaatagcgtgcgctgtacatagttatatcatacctgtccgtgaaaaaaaagactttccaccaatttcatgaaaatttaagcaacggtccgcagactatttgtagaatgccttaaacgccttatacgtatgatagacatccagcttggaagccagctcaaaaggagaatgcatggacaggatgggcacgcccaaatccacagtatccacatccatgtgcgccacaaactgggcaatggtaccgccgccgcccacatccacggctcccagctcaccggcctgccaatacacgccttcctcctccataatggcaatgacctttgccatggtctcggcgctggcgtcgttggagccggactttcccctggctcccgtatactttgtcagcacacagcctttgttgatatagcttgtgttgcgtccctcgtacacatccgggaagttggggtcgaacgcagcattcacatccgaagaaaggcacagggattttctcaatacttccctggagctgacacctgcctgttccgccaaatcttctatgtaatgaagcacaaaatccgaattcagacccgtgttgccggtggatccgatctcttccttgtcagccagaatggtcacggttgtgtgggcaggcttctttgcgtctatctcagccgtcagagccgtataagcgcaaaccctgtcatcctgtccgtaagcgcctatcatgctggtgtcaaagccaacgtccctggcctttacagcgggaaccatttcaatttcagcgcggaaaaagtctttttccgtaattccgtacttttcatttaaaagacttaaggccatcagctttacaggctcttttacctcctcatcctggaaggggagggatccaaccacaatattcagctcctcgccctttaacccgtcctttaagggacgctcgttctgcctggcagccaggtggggaagtaggtctgtcacgcagaataccggctccttctcatcctctccaatggaaacctccaccgtctctccgtttttcttcaccaccacgccgtgcatggccaggggaatggtcccccactggtatttgcggattccgccgtaataatgggttttgaaaaatgctatatcctccttctcgtacaggggattgggctttaagtccagcctgggggaatcaatatgggccccgttgattctcaggccctggtccaggggcttctttccaaaggtggtggcaatcagcgatttgccccggttcacataatacaccttatctcccggctcataggattcccctgagtcaaaaggcttatagcctgcctttttaagcatctttaccgcttccttcacacactcccgctcggtctttcccacatccagaaattccttatagccctcgcagtatttaaacgccttttccgcctgctccggtttatcctttccaatatgagggaacgcccatgtaagctgctcctgtaattcctgtccttttgtcttcttagccattattttcctcctggtatattttatttatataatctgatgctttactgacttaagttatgacggttccgccatctataattcaaatgtccgcttccgcccgcagcgcttcgcttcctccccctgtccgtttcttcctgccgggctgaggcgtctgtgcttcacatccagcaaaagcgcggaggattgggcatcaccggacccggcagcggcttctatcatcttcttaatctcatcctctcccagccgggccgaccgggccataaagcccaggatatcccgctctccccgctctatcagcccctttgcgccttcaccggcatgagtccttacataatcccagtactcatcctctgcactttcccttaaaccgcagggccagtacaggcggtacagggccagacgcactgccagctccggcttttcctggacctttacatggggaaacagcctgtcatattcatcaaaacggaaatcccctccgtcaaaacagtaccggtacatatggccgcagccgtgcatttccctcatgatgatgcgggccggtgtgttctccacggactcctcaaaaaattccggaaatataagctttgccaggagcgtccccgaaccggacctgtaatttacggacagggtctggtgaagctccgacaggatatccttaaaacaggacttcctgccctccgcaacgcagatatccaggcacctgagacctgtacagccggtaaataccccggctccccagtcctccacggcgctgctgcatgagagccgcttcaggccgctgcagttataaaaaccataggctcccaccttcctgattgtatcaggcagtatgatttcctccacccggctgccgcaaagctccggctcccccagatattcacagggcggcggttcccgcctgcgcaccgtatccgaaaaaaggtagcctgcaaactcggtcacaggcatgccatcaaccgtccccggtatctccagaattttgtccaaaccataacaacgctggaggcataccccgtccagcgttttttcatataatattctcatggtatcagtttaatcagtttaggggattttttcaagactattttacttccagaaaaaatattcaaaaaaataccggtccgcctgcctcttttgacgcctgcttcccggtatatcctggaacgtatctgaactgctgcacccttgggttccttctattcatccacaaacctgtaccccacgcccacctctgtgagtatgaacctgggattggccgtgttatcctcaatctttctccgtatatttgccatgaacacccgcagggactggtaatcatccgtggtgtcatatccccacacctcctgctggatataatgatgggtcagcaccttgccgctgttattcaccagaaggaccatcatcttatattccaggggagtcagatgtacttcctggtcatggacatacagtttacgcttttcaaaatccagccggaaatagtccagacagaactcctgctcctggtggttcaccgtggagctcttatggcgcagccccacgcggattctggccagcagctcctcggcgctgaagggcttagtcacgtagtcgtccgctccctggtccagggcgcttattttctcccgctcctgtcccctggcggaaaccacgataatgggcacatcggacttctggcggatctggcgcagcacctccatgccgtcgatatccggcagtcccaaatccagcagaatcaggtccggatgatccgcgtaaaagagggatatgccggacagtccgttatcagccaatatataagcgtaaccccttgtcttcagggatatcttcataaaattctgtatgctcttgtcatcctcaatgacaaggatcgttgtctcattcatccttcctgtcctccattggcattgatacttcaaatacagctcccccctgggggctgttgaaggccctgatggtgccgccctgggcctccaccatggccttgcatatggtaagccccaggcccacgccccgctgcttatccccgttctcataagcagtggtaaagaaattatcgaaaatcttatctatcttatcattgggaatccctattccattatctgaaaccacaaacttcaggcaatttccatcctgttttaccctgagggtcaccgtggtgccggtcccggaatggcggaacgcattgtccagaagattgaccagaacctggatgaacagtctcccgtccacagataccagaagtatgtcctccggcgtctccatcttaagtgtatggttccccacccggttggaaaccagccggacagcggaggccacaaggtcgtccaccacttccttctttttattgatatccagacggccctcctggattcgcgtcaggttcagcaggttttccaccatggtgctgagccattcggaatccgagcatatatccttcagcatgctcttaatcgtagcttcatccatgatgcccagattgtccagaagaaatcccgcactgccggtaattcctgtaagaggcgtgcgcaggtcgtgggatatgctccttaaaagggtgctctttaaccgttcccgctctacctgaatcctggtattttccttctcccggctgagcagctccctctcaataaccagggtcagctgggaaatgaccgtgtccacatatatcttttcctcttcgcttaaggtccagccctcacagtcaaatataatcacaccgtaagtcttttcccggttgcggataggcacgtacagcccattgtcatccggaaactggcattctccatgaccgcagggaatggactgcctgtagcaccattccgccatgtaattgggaaattcctttttctcgtcctccttcaacaggacgctcaccggctttccggtcagattggacaggctttcttcgctgtactccttaatctgctggtaaccggacagattcaggaatccgcttcctatctcattcatcctggccgtaatctctctctttttgttggcaatctgcatctgcttctgcagcttcaccaccagggtggccacaatagaggcagccgccacaaagacaatggaggataccacgtagttcacatcatccatatggaacgtaagctttggctccgtaaagagatagttgaacgtaaaggtaaagacaatggccgcgcacagggcccaggccaggctgctggtagccagtatgctgatgagcacccccagcagatatactaaaagcagattctccgccctgatcccgcagctgtccagcacaatggccagtatggtggaaatcacccatatgacagccatttttgcacatgcctttacaaagtccagaacccagtcccaactatataacataactccttttactctccctcttcctgcttttgccctaaaatggcctgggcaaggatcatgggcaggttcactgccctgtccactcccagctcctcaaacagagccgcgttcctggggttgtgcaccaggcagacggaccgtttgattcccaggaccttcctgcccatctggcatatctcaaaattatccgtgtcctcccggcccagggccaggataacatcataattgcggatacctgcttcctccagaataaactgcctgcagggatctcccagaaccgcgttcacattgtaggaggcgcagagatgctcacagaatgctttgtccggatcgatcacagttaccttatattttttctccatcagaaggccgatgagaaaatccgcatattctccccccagcgccaccgctatcttcatgctcacacagccacctccctgctcactgtctctgccagacgtccataatcatccgctgacaaatcatagagactgatgggtttaacaggcagatccgtaaccagctggtgccttccggtgtcatccagacgggcatagacctggctcacatggaaaatacggctggcaatctgagccagcaggagattggtattgtcatcctgggtggatgcgataaacagacctgcatcctcaatcccggctgcctttaagacctggggatccgttgggtccccttccatctcataccccctgaactcctccggcaggtaacggaagctttccctgtccttatccagcaccacaactttatggcctttcttatataatgactttgccagcgcagcccccaacggtccgcagcccgcgattacgatacatttatttttatggaataacatacgatctcctcctttcatttatatgttcccaattctattgtaaaagagaaccatataaagaaactagagaaaatgtattaggggggcataaagattctataaagatatctttatccccctctttatactaaatactataccatgaataccggccatgtcaaatcaaaccggtccctccgccatgcctacatgactccgaatgccttataaaacagccatatgacggtcccccctatcagtcccacagaggtcaccacccctaccatgaatatggccgcggccagctgcacaattacgctggaaatcagcggaaagcgttcacacaaattatctatcttctgtcccacgggactctttaacttaaatatcattttagctgtcatggcaattccctctcttcctgcttaaaggatactaccagatagcgtaaagattccatccatggttcacggtattgtataaattatctgcaaatacgcggcccgctcatatcctttaaccggtaggaagtctcctcggcaatgatatttaagacattcttgtcattgggcttaatgatgtctccccctttcatctccacaccaatgaccgcatagaccgtatcgtccttatatacgggcgtatatctggccctggctcccggcagtgtatctgtggtggctccggccttatgatggtttttatagacccaggccgccacagccatctcgtccgggttcttaaacagggaggtaaggcaggacgcgtcctctctttccgaggccggatatatcttcatccggttcattttcccgtccagcatatcgtatataacaatgttgcgttttaataagctctgtaccagccttccgcatatatccagtatctcttcacgggtggttccctttctcagattccggttgataccaaacagaatctgcatataccccgattcagcctcacttttctctgcttcccgcttaagcctggccgccatggagctggtaatcagggcacagacaagcatggccgcaaaggtaaaaggataaatactgccgtctgcctgaaaggtgtagcgcggcggcgtgaaaaagaagttgaacagcagcaccgatgccacggaagccagaaaaccataggtaccggccctggtgacataagctgccagcatggtccccatcatgtaaatcatggccacattgatgatgcccagcttgtagtggtccagtaccatggaaagaaaggtacatcccgccatgataaggcctgtctttaagatatccatgctgtatttccgtccgttttccggctttttaatctttccattctccctggccgcggcatccggtatcacgtatacatccatgttgggtacggccttgatgagacggtcaattatggtggacttcaagtggaggaagctgcgttttctcaccgtcctgcctatgacaatcttggaaatgccgttccttctggcatagcccgcaatctgctgtacaatatcatccccgtaaagggtaatcacattggccctgaactgcttggccagattaatattggcctccatgctcctgctgatttttgcatgttcccttttcatatccgctgtttccaccagaaccgctgtaaaatccgcgtgaaacgcccctgccatcctggccgcggtcctgattacccttgcattggtgggggagggggacaggcagaccagcacgtgctcaccggtgtaataatccttgcccgccgcatcccgctccctgaccacctcccggttgacccggtccgctgtccgccttaaggctatttcacgcagggcagacaggttttccactgtaaaaaagcggacagacgccttgtccgcctggtctttgtggtaaatcttcccgtcctccaggcgctgtctcagttcctccggcgcaatgtccaccagctccacctgtccggcatcatcaaatatatcgtccgggattcgttcatatacccgcacatgggtaatggatgccacgatgtcatgaaggctctccaggtgctgcacattgaccgtggtgtacacgttgattccggcgtccagcagctcaatcacatcctggtagcgctttttgtgacggcagccctgggcattggtatgggccagctcatccaccagaatcaaatccggccttctcataagggccgcatccaggtcaaattccttcaggatgattcccttatacgttaccgccattggggtcagcagctccattccggccagcagctccattgtatccggcctgtcatggggctctatgtatccggccaccacatcccgtcccgctgccttttcctgccgggcagcctccagcatggcgtatgtcttgcctactccggccgcgtatccgaagaatattttaagccgtccccttcccttgtcactttccctgggaaaattctgctttaaaagcagctcagggtccggtctctcatcccgctgcccgtccataagccatttctcctttctattgctccgttctctaaaacagctgtagagctgccgcaatgcgcggcaactctatacaccataagcaaatcatgtttaaatcagtccatccagagccagattcactttcagcacattcaccctgggctctccgaacattcccaggaacctgcccgtggtatacctgctgatgacggcctccacatcctccaccgccatattccgttccctggcaatccgctctgcctggtagccggctgccgcgggagaaatttccgggtccagtccgctgcctgagcaggttacaaggtccacaggaatgggctcctctcccttttccggatgggctgccctgattttctccacccgctcagctatcatggcttcaagctcactgcctgccggtgtcttgttggaggcacctgcatatgccagaggctctccgttttcgtctgtaaatgtccctgtatccacattcatgactctgccccaaagatactggtttccggtaaactcctgggccagaagggcgcttccatatttagtgccgtccttgcccacaatcaccgatccgttggcctcatggccaaatgccacattggccgcagccgtgatgaccgccgggtaaatgacgcttgttatgattaacatgaccaggaaaaaacctgccatttttggcaatactgattttactgttttcataaacattctcctaactttgactgattctgctgtctgcatctgcttccttcacacatcacaccaccagccctgcggccgtgatcagcacgtcgattgccttgattgctatgaacggaatgatgattccccccagtccatagaccaggagattcccggacagcatccgggccgcagagacttccctgtacctgactcccttaagagccaggggaatcagggccacaataatcagggcgttatatatgatagccgagaacacggcgctgtttgcactgtgaagccccattatattgagggctgacagtcccggatacaatcccataaacagtgccgggatgatagcaaaatacttggcaacgtcattggcaatgctgaaggtggtcagggatccccttgtcatgagaagctgcttgcctatcttcactatctcaatcaacttggtgggggatgaatccaggtccaccatgtttccggcttccttggctgcctgtgtgcctgtattcatggccaccgccacatctgcctgggccagggccggggcatcattggtaccgtcgccggtcatggctaccagatggcccctggcctggtaatcccgtatcatgtctaatttggcctccggggttgcctctgccagaaaatcgtccacaccggcctcagccgcaatggaggcagcggtcagcggattatcgccggtaatcataatggttctgattcccattttccttaaatccgcaaacttttccttcacaccctgcttcacaatgtccttaagctccaccacgcccataacgcgtccgttctttgccaccacaagaggtgttcctccctggtttgcaatccgctttacgatgtcctcgcattccctgctgaacgcgcctccatgccggtccacataggctttaatggcgtcagccgcgccctttctgatctcatttccattgtagtcaatgccgctcatcctggtcttggcagtgaagggcacgaaggaggcctgaagctcctccatattccttgcgcggattccgaaacgctcctttgccagaaccacaatgctgcgtccctcaggagtttcgtctgccagggatgacagctgggccgcatctgccagctccatttccttgtggccgtccaccggaataaaggcgtctgcctggcggtttccaagtgttatggtacccgtcttatccagcaaaagggtatctacgtctccggccgcctcaatggccctgccgctcatggccagcacattggcctggttcaggcggctcattcccgcgataccgatggcagacagcagagcgccaatggtagtgggcgccagacagattaaaagcgctaccagattggtgatggatgtgggattggctgctcctgcctccacggaggagaacacggaataggagtacaaggacatggtaacaagcacaaagataatggacaatgccaccagaaaaatctgcagtgccagctcattgggggtctttttgcgggaagctccttccaccattgcaatcattttatccatgaagccctcgcccggattgctgctgacccgcaccacgatccagtcggatataaccgtggtgcctcctgtgacggcacttctgtcaccgccgctttcccggattacaggagctgactcgccggtaatggcgctctcatccaccgacgcggcgccctccaccacgtcgccgtctgccggtatctgttcccctgccttaatatagacaaggtccccctttttcagttccgtggatttcaccctgacggcctcgcttttgcggtcagccgaaggaatcctggatgccatggtatcctttctgcctgcacgcagggcatctgcctgggcctttccccttccctctgctatggcttccgcaaagttaccgaataaaaccgtaaaccaaaggatgacggatatggccagtatataacccggcgcagcgtccctgatacctgccagagaaaacaggaacatcacaaaggtcaggatagcggatacaaaaaccataaacatgaccggattctttatctgggtccttggattcagtttaataaaggaatccttaagggccctgcacataatctcatgattggaaaatatactctttttttgttcattcatgtctcattgacctccctatgctatcatctggaaaaactcagccaccgggccaagtgacagggccgggaaaaagctgagggcccctaccagcagtaccacgaaaatcaaaaggaagataaacatggcattatgggtgggaagggtgccggagctgactgctacctttttctttgccgccagactgcctgcaatggccagggtggcaaacatgggcaggaaccttacaaacagcataatcagtccgatgctcacattcaggaagggcgtatttgcgttaaatcctgcaaatgcggaaccattgttgccgcctgcggatgaatacgcgtaaaggacctctgacaatccatgggctcccggattattcaggctgtcatgggtggacggaagcagcgtggcgataccgctgcccaccaggatggccacaggggtcgcaaggcagaccagcacagccatcttcatctcaaagggttctatctttttgcacaggtactccggcgtacgccccaccatcagccccgctataaacactgtaaggatggcaaaccccagcataccgtagagcccgcagcccgtaccgccgaataccacctctcccagctgcatcagcagcataggaacaagtccgccaaacggcgtgtagctgtcgtgcatggaattgaccgagccgttggaagcagccgtggtaaatacagcccatgtcccggatgtggctatgccaaatctggtttccttaccttccatattaccgcctgcctgtccctcagtccccatatagaccgcgccgtcctgggctatctggggggtgccggcctgttcactgcagcccacaatggccagcgctgccgccagcatgatgaacatggccaggaacaccgccacgccctgtctcttgtccttcacattcctgccaaaggtaaagcacaggcccgccggtatgagaagcagggaaatcatttcaaataagttggataacggagtggggttctcaaaggggtgcgccgagttgttgccccagaaaccgccgccgttggttcccagctgcttaatggcaatctggctggcagccggtcccagaggaacgactccctttgtgacctctgcggcggtgccgtcctcctgttccaccaccaccggttccaccagctgtacctcatcgtactgcttaaaggtctgcggaacaccctgggaggcaatggcaagagataccaccactgacagcggaatcagtatgtaaaggactgtccttgtcatgtcggtgtagaagtttcccagtcccctctccttcacgcggacgaatccgcggatcaatgcgaacaacaccacaattcccacagcggcagacacgaaattctggaaattcagcccgatcatctggctgaaatagctcagactggactctcctgaataggcctgccagtttgtgttggtggtgaagctggaggccgtattaaagcccagatgccagctcattttgcccattccctggggattaaggggaagcaggttttgaaagcacaggatgatccagagcaccgccaggctcatcacgctgaatacggctgtgcacacggaatatttcttccagcccatctcctcctctttatcaatcctcaggaccctgtaaatcaggttttccacaggcagcagaagccttgacaaaaacacccgctccccgttcatcacctttcccatataggacccaaggggtattgctaacactaccagtatgacacagtaaattatcatctgcaacgccacattcatcattgtttatcacctctcaataaaatgattaccaggtaagccagtataataaccgcggttattcctatgatacctaacagtaatgccatggatgattcctcctcttttcaagataggggtatggtatcacagatggtgataaagattccatatgggagctggctgctttgtataaatataatgttaatataaaagaaatacgctccgtcctctgtcgcaaaaacataatgcggctgcatccatgtatgcgatatacatggatgcagccgcagcttatcacaatattttttattccattattcccaaaataccgacatgagctccctgacagccctctcactgtccacctccaccgcaaaacgcacgtattccgcctggaacgggtgctccctcagatccgtcacaatcattcccctgcaataggtgccgccgcactccaccctggccttcctgctctcggtacggaccaggctgggcgtcacggcgcacataacagccaggggatcatggagaggacagtcacccatgcagtagttctgggtctggtttcccctgagataatggaccatggcctgcctcatataatccactgccggacggcaggacggcttgcagcagcccgacagccagtccagatgctccattttaagccttgtcctcatggtgacatccagtcccactaccgtgatatccataccggaggtaaacacctggtcgcaggcctggggatcgcaggccacattggcctcggccacaggagatacatttccgcgcatggtcagggtaccgcccatcatcacaaggccctttaccttatgcacaaaaccgggatattccctaatggtgcgggctatattggtcagagggccaagggtgatgaccataagctctccctcatactgctcagccagatccatgtggaaccggctcacgtccacgtctcttgtactgcggcggctgggaggtaattccacattgcccagcccgtttttgccgtgtataaaggcaacccggccgtcccattcccggcaggatggcttctccgcccccactgccaccggtatatcgggcgctcctgccaggtccagtatcttcatggtattctccgctgccagccatgcctctacattgccgcacaccgcagatatgcccactatctctatctcaggattaaaaagcgcgtataatagggcgatggaatcatccacacctgtatccacatccagtaaaaccttcatctgcctctcctctttcattatgtcatgcggtatatcccggcgccagtatcctgtctgctgtcccggcttcctctgccgcctctgctgcctcagccgccagttccagggcgcatcggatcatgctgtccaggctctgctcccgttcctcgttggtaagagccctgtcatggtggatgctgctccccacagtcaccatgctgagcgctctcctgcctgctcttgccgctgtgcagtagagggacaatgtctccatttcctggaccagaacccccattttttcccactgtcctttttctccctgacagtcctcatagaacacatccgaactgtatacattccctgcccggaaggaggtatggctgtttctggcatgggccgcagcggcctccagaaggccgaaatccgctatgggtgcaaaggttcccggcagatggtactgggagggaaagttagagttggtgcagcagcccatggccagcaccaaatcccccacctccacattgcggtgaatggcgcccgcggtccccacccggatgattgtgtccacatcataattgtgatagagctcgtacgcatagatgcccatagagggaatgcccatgccgctgccctggaccgatagtttcttacccttataatatcctgtatatccattcatgccccttacccggttgtagcagaatacgtcggtcagataggtctctgcaatgtattttgcgcgcaaagggtcacccggcatcaggacagccttgccaatctgtcctggtcccgcttcattatggaatgttttcatatttgattactccgatttctttattatattcctgtcattctttcttcgtatgctcagctcatgctgctcggaaccaaagaacagcttttgggacaggacaggcgtatcatactcggaatagagcacctcctccagaatcaggattgggtctccctcctgcatgttcagtatatttgccagacgctccctggcctgtcccagccggattttggcatcgctgtacaggccgccttcggacagcagcccggtataatactggtaaacggtatctggattctccaggtccacatcgctgttgtcaagtacctcatgaggcatatacaccatggcaaagccggccggcgtatcaccgcagtagtaggttatgtcaatgaccgccaccacgctggagggccgcagcttaagcacctgctggtgcttttgggtggccggctggaaccctatggcggtcaccaccttatcaatgggcctgctgcagaaatccacaatgggatttcccaccttctccagcccgcttttgctcatatcctggttggaaagcacaatgttgccctttccctgatggtttatgattaaaccatcctcctgaagaagcagcatggcctgccgcaatgtgcctctgctgactgcaagctgttctgccaggatgttctctccaggcagcttatccccagccttatactttccctctttcagccattggctgatggtctcataggcagtcacatacaacggtatctttacattcttttcatttatcacattgtccttcacaggtctgcttgctcctttcgcgcgcccggcgggcagtcctcactatagctcactatagattagtatagaactaatccaccaatttgccaagtgcctccggacctttcaccctctttcccacaaacagcagtaccagcagcgtcaccccatagggcagcatctggacaaactgggacgggacagacgcatccgtcagatagaatctggctgcctgggccaccgcaaatatcattccggctcccatggagcccaggggctgccatccgccgaaaatgttggctgccagtcccataaagcccctgcctgccgtcatatccgccacaaacaggttgttctgggaaatggacaggtaggaacctgccagccctgcaatgcttcctgcggctatcatggcaatgtaacggtaacggttcacctgcacaccggcagtctgaaccgcgtagggctggtctccaatggcccggtacctgagtccgaacttggtcttataaaacacaatccacaccgcagccacaataaggaacatagcgtagagatagggggactggtctttaaacaaggccccgataaccggaataccggaaaggccgggtatggtcagattggaaatggagggaacggattccgacattccttctgtctgccagattgcctttaacattacggccgtgataccgctggcaaaaagattgatgcccacacctaccactgactggtgggccttccatttcagacagaaaagggcataaaaccagccaatcataccgcccaggaccacggacagaagcaccccggccatggctgatccggctgcataggaaccggctgccccggcaaacgcgccgatgagcatgattccctccacacccaggaggatgatgcccccgcgctcagcgatggtgccgcacagggcccccaatataatgggcactgaaagctgaagggtaagtccgataaaattattaatcatatccatatgtcatcctctctttctgctccacttaatcagttccggagccgctaccaggagtatcaccagactctgtattaccgtcaccatgttggtgcttaccatggtctcgcggctcattcgcagcgaccccatatccatgattccgaaaagcaatgcggtcaaaagcacaccggccggatgattccttcccaatatggccacggcgattcccgtaaagccgaaggatggggaaaaaccctctataaagcggtggtattttccaaacacctctgtaatgcccgcaagggccgcgattcctccgctgatggtcatggacataatcagaaacatgttgacacggattccggctgttccggaggcagagggattggctcccactgccctcagctggtatcccaccgatgtcttccacaggaatatgtacatggctgccgccacaaagagcagcaggaacagtgcataggtgagctgggtcctgggcaccagctttccgaaccagattccctcggctataagctcagtctgggccgtggaaccctctgtcttaaagggcccatttaccagataggatgtaaaaagagtacagatatagttcagcataatggccacgattacttcattggtgctgaatctggccttaaaaatgccgggaacgctgcccacaagcatgcccgccgcgattccggccaggatactgattacaagcagcaggggagcagggagcgcgctaaagtaaagggcggtgatgacactggccatggctcctgcgtgaagctggccctctgcaccgatattcaacataccgcacctggaacccatggccacggccaggcctgtaaaggccagcggaatgctcttgctgattgtattggccagggactgcggtgtgcccagagctccctgaatcagggaaccgtaggctttaacaggggattcccctgccaggaggataaaaagggctcctatcagaagcgcaagccctatggatgccagggatttgcctatttccgctgtgtgcctgccgccacggatttttccaacggtccgggctttctcacctgtccggtcacctccgtctgcctgggcgttcttattgctgttccatttcatgagcccgcacctcctgtttttttcctgccatgaacagtccgatttcttcctttgtatactccccgttgtcaaactgggcgctgacctctccctcgtagaatacagcgatgcggtcgctcaggttcatgacctctgaaagctctgccgatataagcaggattgcctttccctgctcctttaactgaagaagtgtcttatgcaccctctcaatggctccgatatccagacctctcacaggctgggccaccaccaccagcccgggatcatggctgatttcccttcccagtatcaccttctgctggttgccgcctgaaagctgtcctatctcctggtccacaccggccaccttgatttcaaactcctcaacctgtttctctgcgtcctgtctcagcctctcataatcaatgaaacccttcctgcaatactccggcgtttcctgatagcccagcaggaaattctctgtaatggaaaagctgggaatcatggcattcttatggcggtccgatgggatgtatcccaggcccatggccttcctgtccttgacagccatgttctggaccggaattccatttataaaaatttcgccttccctgaccctgcggtttcccacgatcatttcctccagctcctgctgcccgttgccatccaccccggcaatgcccaggatttctccggcacggaccttcaggctgacggtttccccggccctctcatgaaggcgcacacctttcagctccagaacggcctggccggttttctgtcccctctttgccacgatgttctccacctgcctgcccaccatctgggtggccagctccctctcattggtggagctggtgtcgcaccggaacaccaccttccccttcctgatgactgtaatgcggtcagacagggacatggtctcattcagcttatgggtgatgaatatgatggtcttgccgttttcctttagctggcgcagaatcttaaacagctcgtccacctcctggggcgtgagaaccgcggtgggctcatccaggataatgatgtccgctccgcggtacagggtcttaagtatctccaccctctgcttcatgcccacggacaggttcaccaccttctcctgaaggtcaatcctgaatccgaaccgttccaccagctcctccacctttttccggctttccttccggttgaggaacaatcctccggattcctttcccaaaataatgttttcaagaaccgtcagctgattcaccagcataaaatgctgatgaaccattccgattcccagggcataggcatcgttgggattggctatggcggcctttttttcattgatgaatatctctcccgcatccggatggtacagcccgaagagaatgttcatcagagtgctcttaccagttccgttctcacccaggaggcagtggatttcctgctgtcccacgatgagatcaatcccgtcattggcgcgtaccggcccaaaacatttgacgattccaatcattctgattgcgtccatatcttcctcctctatttatccggcctatcttaattaagctcagagggaacctgaatctctcctgatataattttctgcttcagctcgtccagtctggccaggatatcatcggaaaccttgatattacttccctccaccgtcacatccacgcctccgtcgctaaggcccagcatctggttctcccctgtataggtatcctccacaatgctggcaatggcatggtatgcgcaggaatccagctttttaagcatactggccataatatagtccggagcgatgctgttctggtttaagttcacgccgatggcagcaaagcctttttcctcggcggcctggaacatgcccattcccgaagcacccgctgcatggaagattacgtcggctcccttttccacaaaggtgttggcaatggtcttggcagtggtggggtcattgaagccgcccgcgtaatctacaagcaccttcatttccggttcaatatactcagcccctgccttgtatcctgctgcaaagcggttgataaggggattatccacaccgccgatgaatccgatggtctttccgtctcccagcttgtcatctgtcttttcctgctttgcaagggctgccagggcgcctgccagaaacgctccctcctgctccttacaggaataggaggctacattgggaagatcagaggtggcatccaagagggcaaaccgctgttccggatatgtggaagccacattggtcagggcatccacctgttctgcccccacgcagataattaaatcatagtccccggacgcagccatctcatcctggatgatttcctcatctgacacagactttggctccacctcatcgtaagtgattccgtaatcagcggcagcctttttaacaccctccagggccaggtcgttaaaggaattgcctcccagtcctgcctctgtgaaaatgattcctatgtgtgctcctcccccggaaccagttccggtcccatctgctgcttcccgggaagtctgcccgctccctgcatctggcttcgatgcagacgaaccgcatcccatcactgcactgcctgcaatgccaactgccgcacataatgctgcccactgtctgattcttttcttcatcatgttcccctccgttttatacctattttgttttagtgtgtatatgttacttaacttgtttaacaagttatctaaaatgtagcatgatttattatatttgtaaatcccaattttacattcacccatagaatcgttaaatcttgctaaatacaggcaaacttttctgtgcaattttacatctgtattcccttaaatttacaatatattggaatgattgagatacccggatcacagcctggccaaaaggacaaaaaaagccggatggttttcattatctgaaagccatccggctccggcctgtaacgatactcaggattcccatatgggaagcaggccctatattctgtgcgccaccgcttttattccactaaaaaacaagtaccgattcagatttctcctcctcgatacctgttttttgtttttctgctctctttactctgttcttttggatttcctttacttatacggtctgtttattttcacctttcattatcaagtacattttaatgatactttctcgtcatatcattataaatgttcccgttccttgatcatctactcagtatttgaaaatataacgggactcgtattgtatcagtttccttttgaacatttcatcaggcagattccttattctctgttttctataataatcatttgattatatggaaaacgaaaaatcactttccggtggtctgtacctccttttttagatttcgttctttttgatagttttagtatactcaaaaggaggtcatttgtcaatacttttttattaatatttaaattttaatagtctttttcgtatatactgtataaattttcagttttttcacgacaatcaggcaaatctgcacactacgtttttgcagcagcagcttcctattctcccactaccattattctcctactaccctgtatgtctcctccacaatgcgctccatggcgttgagtatgttctcatagccggtacagcggcagagatgcccggatatcagctttttcagctcctcccggttgtacttctttcctgtgcctacaatctccacggccgacataataagaccgggggtgcagaatccgcactgcacggccgcctcttctatgaaggctttctggatgggactcagctcgccgttgggaccctttaagccctccacggtcatgatacttttgccgtccgcccacatggacagatagatgcaggaatcaatagcctctccatttacaaggaccgtacaggccccgcactccccaacctcgcaacccttttttacggatgtgaagcccaggcggcgaagggtatccagaagagattccctgtcatccacagcagtctcctgttccttcccgttaattttcagcttgattactttaagcatctgccttacctcctgccagtgtgatggatgtttttagagcgcgcctggccagctccccgatgagctgcaggcggaattcccggctggccctccaggatgtgcggggatttacctgggacagggctttatctgcaaacaggtcatatatggtcgcatctgacacctgtttcccgcgaagggcttcctccgcctcgtaacagcgcaccggagtgggggccgccacgccgtaagccagacgtacgtcttccagcactgttttatcaggcgacagctttaccctcaccgcacatcccagtgttgcaatttccatggccctgcgttttccgtatttaatataatggccttcccatccctcatagttttccctggtaatcttaaatgccgtacagacctcattctgcttcctgaccgtacgtccgggacctgtatagaattctgtaaccggcacttcccgtactccctccggcccttttaacaccactgtagcattcagggcgcacatggtggaggcagagtccgcagaggtggccccattgcagatattccctccgatggtggccgtatttctcacctgaggtcctcccacctggtccactgcctcccccagcatgctgaggtgtttctttataatggggtcattggttatatgggaaaaggaagttgcaggccggatgatgatggtcccgtcctcctccaggctgacgccttttaactccgggatattgtggatggataccaggcccctgcctgcatcctttccctccctgacgcgtatgagcacatccgtccccccgctgatgacctgggactgagggtccgcggtgagggcggcaatggcgtcctccaccgaatctgcttcgtaaaatgactttatatcaaacatgatgactctcctttatacttacctgacctgctgttttacatcagccattacagctctatatcaaacccttttcctgaaatgcctctatgagcctctgtggcgtcatgggtatggtatccatggcaacgcctgtggcatggagcactgcattgcgcagggccggcgccaccgggatggccggcggttctcccagggacttatttccgtaagggccggtggggtcctcaagctggataaacttcacatgaaggtccggcgtatccatagctgtgggaatcttataatccagcagattatcattgagaggcctgccggcgtcattatataagaattcctcggacaggccgtatcccaggcccatggacatgccgccgtgcacctgcgcctctgccagctcagggttgatcagcattccggagtcatggacatttacaatatcctttaccgtcacctgtcccaggggcatatccacttccacctccacaaaacagcagccggaggaaaatgaattgtccctgcattggttggtgacctccgcagtgatgtgctcagagcgctccagggagtaaaaggcggtaagagccagggtttccatgtcaagaagctcttttcccgtggccttctccacaatgtgatcgtgagccacgtccatctcttctgccgggcggcctcccagcataaacccggcataatccagaatcctggccttcagctgctgcgcgcatttcttgacagccataccggtcacataggtctggcgggatgcatacgcccctgtgtcaaatggggctgtatctgtgtcctgtatggatacaatatacactttttccagggaaatgccggttgtctcagctgccatctggctgaatgcagtgtcagcaccctgtcctatttccgtggctcccagctgaagctgcatggagccgtcctgattcagtatcatcctggcggaggcagtctccagtgaaatgggatatacccctgtcttataacagaagatagccattcccactccccttctcacggggcctgtctggttggcataagccctgcgcttctcctcccatccaatgtacttcgccccttcctccatacactttttaaggccgtaggaatggaaggtaatgccgttggcagggtccacgaatccctctcccatgcagttttccatgcggaaagccagggggtctgcgccgattgcccggcacacatcgtccgtaaggcattccgataaaaaggctgcctggggaataccgtatcccctcatggctcccgcagtggcagtggaggtccataccgtgtagcagtcaatctcagcccccagccggtcctggtaaatatccttgaatacattgccgcagttggcgcagatggcgtggccgtgggacgcataaccgccgttgttggcataggcttccagcttcctggcaagcatttttccgtcttttgtggccagggccctgcatttcccgtcaatggcatggcgggtcctggtgccgtaaatggtttcctccctgctgatttccaggcggaccggacgccctcccaccactgtggtcagataggcatttaagggctcatagagcacatcctgtttgttgccgaagccgccgccgatgtagggcttgatgactcttatctttccaaccggcagtcccaatgcctgggaaatgacgcggcgcacaatatggggaatctgcgtggaggacgtgactgttatcttgccccccggctcctgataagcccatgataccggcagttcaatatggcagtgggaaatacgcggggtgtggtactcccgttccaggaccaccagattctcctttccgtacttctcctcagcctccctgagcccttcctcaaaggtaaaatcctctggccccatggtgagatgggaatagacaattacattgtcctttctcagatcagggtggagaggcgtggcatcctctgccatggcctgttccactgtgaccattggtttgtattcctcatattccacctttatgagtcgggccgcctgctggcaggccacatcatccgaggcaataacggcagcaatgtcatccccatagagcctgacgcgccggttcagaagctttctgtccccgatatcctggtgggcggcctccacactccacggatgaccggctgtgggaaactggtaatccggcacatcaaaacaggtgacgattttcacaacgcccggcaccttaagggcgtcctcaaggtcaaacctcttaacaagcccattggcaatggtggaatggaccaccctggcgcacaggcagtcccttggttccagatccgatgtgtactttgcctctcctgtgacttttgcgtaagcgtcaacacgggtaacgcctttacctactatattattcatgataaatccgtcctcttttccattctcctgcctctttagagggccagcttccatatagctatcaatatagaaaatacagcaatgccttttttcagaagaatctgattgattttaaccgcattcctgcttccgtatacaactcctataccgtggaacacaagggccgccgccataacaggcagaagatccttgacggagcactgcatcatgtatccgatgcaggcaggtatgccgatgaacacagagttaaagagggccactcccaccgcggtcctgatgccgattcccagaaccaccaaaaggggcatgaccagcaccggtcccccggcgcctgacagggagcacacggctcctgtgacaaatcccagaatcagtgtggctgccaggtgatctgagatgacatatgccctgccgccctcctcctggctcttatccttgcggagcaggatggaaataccggagagaaggaccaccacgtacaggataacctttaccgtggattccggaatgatgagattcaatttcactcccaggacagcgcctgcaaggcttcccagactgaggcggatgccgaatgggatatccaggtttcccgccttgttataattgacggatcccagggcccccgacacaatgaatgccgcaaagctcagcgccagcccctccgtcacccccattcccagaggacctgtatacacgatgggaagcagaaagcctgccacccccgtaagtcctacaaacgcgccaactaccaggttcgctgccataacaatcatccagaacaccatgaaccagttttcctccttgctatatctttatagaatcatttaaaatgtatctgcattttcttccatatacttccgggattcgtacataatacgctcctcgtccagagacaggacctccctgttcttcatgagaatccggcctcccactatcatatcctccacatcgcctgcatttacacattcaaacagtgtgtgaatcttgtttccggtggggcacagatggggctggtccatgttaatgctgatgatatccgccttgtatccggcttccagacggcccaggcttccttcctcgttaagggctgcggccccgccttccagcacaatctttaaaatagtctcagccggcatcaccttgggatttccgttgggaacgccgtggtatatattcatgacagagcggaatatcttcatctcattccaaaggcttaagccgccgtgggccgctccgtccgaacccaggcccaccggaattcccatttccagaagctgcggcgtatccggcactgctttgccgcagttgctgaagggacagtggcaggtctttacgccccgctccatcaccagggatttctcctgctcggaaagtatcaggctgtgggcgcccaggaaattgcttcccagcacatgcattttctccagatactcatagggccgcattccctcccggtccacgataccgttgatttcccccatgtactcgttcatatgggcctgaagcatggtgccccgttccctggcccgcatagcttccagctccacaagacggctggaacaggaattcagtgcccggagagagtaatacaccttaaggtttccctttccgtggaacctgtcatagagggaatccgtacgctttaacgcttcctccgcgtccatggctatggactccggcagcccctcctcatccatggtggaataggacagtgcgccgcgaaggccgctttcctcgtagacagaagccgctgtctccatatggtagctgcccgcgtcgatgaatcctgccgtaccgcattttatcatctccagagcagctgcctgggcgcagagacgcattttatccggagtcagcgtgctctcaaagggaagcatgattctggtccagattatgggctttgcatccagcaccagcccttttagcagctgctgtcccgtgtgcatatggctgtcaataagaccgggcataaacagctttccttttccgtttattgtctcaacggcctgatattttttccacagctccttaccggtctccagaatccttcccccggaaaccgccatatccacatgttcctccaattggtcatactttatcaacagggaaccatcttttattaacaaatcacatgtctgcatcttatcttctcctttttcaatcggacggcctgtcagatatctcgcaccccgccgtcatctcttcacgctatcagataacgcctgccaggctgagaagcatctggtcccagaggcaggagccaagaaaggttcctgtcataacgaagatccccactatcagtatcttccagccctggctgatgaacgtctttaactggtcgctgatggccaggcccgcaaacgctccaaccatggtaaagggggccgtaaaattaatgttggaggctgcctgtatcacaaaatcccttaccggtgaaataggggacgcggaaagcagccctatgatggagcagtaagccacgatgggaagcttcagcggaagcaccttagtgagtaccaccgctgccatggatatcacaataagtactgccagtccgggaatggaatccgtgattcccaccccatagccaatcagattggcaagaccggttccgcatgccgccaatacaaacaacacaagccattctatgtatctcataccgtctcctccttaatatccctgccctctttgttctttaaagcaaaccgtcccagcttgggttccagaatcgtatataatttgtccgtcatgggtatggcgataaacatggtaatatacatgcccgtgattccggcaatggtttcacccacgctggccatggctgaaatggtatcggtccattccggataaatagcgcacaggctggcgcttgagcttgccatcatgattcccgctcctacgccggaaccaagtcccagagcctggggatggaaccatcctgtcattcccaccacagatgccatgagaccgaagtagatggtacccaccataccgcctacgatgtagatggaaaggcttcctctggcctctgccgagtcaggtccgtagatgttgttaatcagcgccatgtggtactccctgttgatggaatgacaggaaccgatggcctcccgtttcatgcccagcaggattgcaacaggcagtgccaggagcggccccaaaagatttccaaaaccatgaagcagaaggaccggaccggactgaagaatggtgtcgatgtttgcccctgccgtaatccccagtttggcgataaagggacatatacccaccaccaccagtttggaagccgccttcacatgcctgttatccacgattttaagcacctgcggcccgcttaatacccccagaataattgcatagaaaatcgggaacaggataaacattcctttccccaccggaatcttaatctggccgatattatccgctatgaggatgaatccaaatgccagggcgtaaatcttccattccagtgcaaaccgttccttaagggaaccatacacatatgtttcttttttgccgctcataagagcccctcctttccagccggccatattttatttattttcaccccggccggctgttacaatcaccttgtattgaatattttagacaaattcccaagattaaaaaaggacaaatgagcacttttaacaagaaaatacattgattttaagaaatataaaatgatatacttacaataaatgactgaataaagcggggaatacaaatgacactgacagaattggaagcggccgcgcccgccctgaaagaatatacaaagaacatgcccgaggacatccgcagccgctgcaccgtaaggacccatgcggcgggctccatcattcaccagaaaaatatggaattagggtatttcggaattgttgcaaaaggtgaaaaccgggtcatcaatgaatttgaaaatggaaatgtctatatgattgagagcaataaagccattgactttatcggggaggtcaccattctggccggaatgagccacacctcggtgaccatcgaggccgtgaccgacaacgtggtggcctacataagccgcagggatgccgagcgctggctggcatccgacataaacatactgaacctggctgcccgccacaccgccttcaagctttaccgttcctcttacaataacggggccaagctgttctacccgccctcctatcttctgttggattatatggtaaagtacggacgccaaaacggcatggaatccacccgcggcatggggtcgtcccgtggcatggggacatcccgcgccccggcatccgtcactgtgctgcgcacccggcagatgctgcaggaagaaatcggcgtcaacgtaaaaaccctcaaccgtaccatacgccagctaaaggaggagggattcttttccatatgcaaggggaagataacctttaccagggagcagtacgagaaggccatagagtggctggaggcggaaaaggataaatagaaaaagaatcaataagaaacaggattttcccgccatataatcccaggaaatcaaccaatgtttcccttactctttctgatataatggcaatattctaactaatttcaggagaattgccttatgaatcagacatcagccttatccccggtaacagaagactacggcgctgcccagatacagatactggaggggttggaagcagtgcgcaagcgccccagcatgtacatcggaagcacgtcctcacaggggcttcaccacatggtatatgaaatcgtggacaatgccgtggatgaagctctggcaggccactgcaccctgattcaggtatacctgaacaaggacggctctgtaacggtccgcgacaacggcagggggattccggcgggaatccagacaaaaacaggactgtccgccatccaggtggtatttacagttctccatgccggcggaaagttcgacgacagcaactataaggtttcaggaggccttcacggagtgggggcttctgtagtcaatgcgctgtcctcccatctgcatgtgcaggtggaccaggacggcttttcctacgcccagtcttatgaacgcggcatacctgcagcccctgtaaaacaactgggtccgtgcagtcaggggacccacggcaccacggtgaccttcatgccggaccaggacattttcccttccattgcctgggacaggaatattctggaggaacggctccgggagacagcgttcctgacacagggtctggagatatccctgtacgatttgcggagggacccggccggcgagtcaacctgtccggtgaccgtctggtcccgtaccttctgtttccagaacgggcttaaggactttgtatcctggctggagcaggacggtgaacccctttatacaggaatcatttccggccgccatgagacagataaggtgcaggcggaatttgcccttgtgcacaactcctcctacagcgagcagctcttaagctttgccaataacatttccacaccagagggcggcacccatgtgacgggtttccgccaggcgctgtccagggcagtcaatgactatgcccgaaacgcaaagcttttaaaggacacggattcctccctgagccgggacgagctctccgagggtctgaccgcggtcttaagtgtacgtctccaggacgcccagtttgaaggccagacaaagcaaaaactgggaagcagccatgtgcgtccggtggtggagcagatggtgtatacacgtctcacgctgttcctggaacagaatcccgcggcggcaaaggccatatgcgacaaggccatgttagccaggaaggccagaaccgctgccagaaccgccagggaaatggcccgccgcaaaaccgcgctgtccggactctcccttcccggcaagctggcggactgttccagcaaaaatcccggtgaatgtgagctgttcatcgtggaaggcgactcggcaggcggatcagccaagctggccagaagccgcgaaaaccaggcggttctccccctccggggcaagatactcaatgtggagaaggcgtccctggacagaatcagcgccaacgcggaaattaaggccatgatttccgccttcggcacaggcatactggacacattttcccttgaaaacctgcggtacaacaaaatcatccttatgactgacgcggatgtggacggcgcccatatcaccacgcttctgctgaccttcctctttcggttcatgccgaagctgatcgaggagggacacgtatttttggcccagccccctctttaccgggtagaaaaaggaaagaaactctggtatgcttatagtgacagcgagcttgagcagaccataaacgccatcgggcgggacggcacctacaaaatccagcgctacaaagggctgggagaaatggatgccggacagctctgggaaaccaccatggacccctccaggcgcacgctcctgcgcgtaaccataaatgacatggaaatgtaccatgagacctgccagaccttctccatcctaatgggagacgaagtggagccccggaaaaatttcattctggaacatgcgcagtatatttccatgctggatatctgataaagggggattttgccttgaaccgggatgatttacagcttttcatgaccatactggaagaaaataatctaataaaggcagccgaacagctctacctctcaccatccactgccggatctcggctgagagccatggaggaagagctgggctacccgctctttgagcgcagaaaaggagtcaagtccgccctgcccacatccaggggacttgccttttcccatatcgcgtcccagatgctggccctttggaatgaagcggaccagatagggggaatgagcgattcccccttcctgaccatcgccacggtggacagctttctggactataatctgacgccgttttacagggagctcatatccctgcacggtttttccctggatatcaaatgctatcccgcggacatgatttactcccttgtaagcagcaaacaggctgatgtgggatttgccctctatgacatcagcaccccccatgtaaatgtgacccctctctcagaggatgacatggtgcttgtggttccggaaggctccggtctgataccggcagaggattgccctgctcaaccggttcatccgtccgtcctccctcctgacagggagctttttaccggctcctccgccaacagcaatatcggatggggtccccagtttaagctgtggcacgaccggtatatcagatccggctcccgacccctggtgacagccaccagtatttccatattgaatgatttcctggaagccggggattactggaccatcatgccctccaccacggccatgggactaaaaaagcagtaccctgtccggatactgcccctgtcaccggctcctccccggcgtaccctctatatgctgaaacataataccccttccaggatatcgctggagaacatggctctctttacgggatatctgaatgagtatctggacaggaaaaattcgttaatactgtaatggttgcgaaacagccgtttagataccaaacacatgcctgcagaattccagcgcaccctttgcatccctgtccagtgcttcctcagaaagatccggcaccatgtctctccatacctttatctcagaaccgatggtccctccctgcatgacaaaaggttccatgacagcggctccctgatagttaatatcacggagcgcctgccctatctcagcccatggcaggctgccttttcccggcaccaggcggttctgttctcccagatggagatgtcccagcctgtctcccgccttgcggattgcatcagccatatttgtctcttcaatattcatatggaaagtatccagcatgatttttacatggctgcttccaatctcatcgacaaaatcaattgcctcttcacaggtattaagaatatacccctcatagcggttcagtacctccattccaagcaccacgtcacattcctccgctgttttggacaattccctcagattcctgacagccctggcccggtctccctgcttgtcattattaatggtaaaatccacgggccagtaggaatataatccccctcccaggatatggatatccattaactgcagctttggaagcaggtccttgaagaatgtcatagcccgtctcactgcctccgggtcttctgaacacagattttctgctttagtaggtccataaccagctgttagaacaagccctttttctttggcgtattcacgtagctcaatcagctgttccttggttgtgtatacatctctgagggctgcacaggaaatttccaggacatcaaaccccaaagcagacaccttatccatatacttcttataatcagcaaaccattccttcgtccaataagcaaaataaataccatatttcatcccagctacctcctctttaaaatacctcaaacaaatgttcaaaaaacttctctttattaaccttcatggctactctatgacgcccatcgctctttttcttccagtaagtgaatcctgaaagcaaagagctgtctgtttctatgaataagtccccctgttcaaataaacacacatcatcgtgaaacagggaaactgctgccagcgggtcatggaatgtgactctctcttcatccttaaaccactctctggcaatatctaatactggttccagaatcgggtggcggaacaaaccttccgcttcctccggcttcataattaactgactggtcacattcaaaccgcaggtaatgtgttcccgcacatctgccccatatacaatctttgtcgcgtgagggtcgataagtgcgttattttcaataactcccttacttcccaaaacaataacatcactcttttccatagcgctcatggtctcgcctgtattatcgtatctggtatatgtaggcgagccgcacataagcacaatacgttttaacaaggaagcaatttcagggtccattgcaaaaagcagccccacattggtgagaggggcaatacataccaatgtaatctcccctggattccttcgtattacatcctgcatgaacgcaaccgcacggttaggcggaaattccttttgatgttcccatctgccgagtacctttttctgcggtgcatacaactcaatctggggaacaaaaataggattttcacatcccggataaataggtatgtcttccctccccgctatgcggcacagtacgcttgccagccttgcccgttctgccgcctctccggtaacggtggtgattcccatgatttccgcatccggattagccagcagatatgccagggtaatggcatcatccacctctgtaccgatatccgtgtccagtaatatcttttctcttcccatatgtattctccttatgattccggaatccatctgtattaaatcataaaccgctcattggctacatacagttcccggaagaccctgtactgtttttcataaagacccacatgctctggaatgggctcatacaccttttcacgaaaactaacaaacctgcgggcagcttcctctatactgttaaatatcccgcacccggttcctgccagaatacaggcacccagacaggcctgttcatccacttcacaaacctttacctttttattgaatacatccgcctgtatctgcagccatacatcactgtgggaaccgcctcctgaagcaatgacagtttcgcactggatccccagctcctcaaaaatagtcagcgaatctctcagactaaacgtcactccttccatgacggcccgggtcagataacgtctgtcctgacataaactgagaccaaaaaacattccttttgcactgggattcatatgcggtgtcctctctccggacagatatgggagaaatatcagacctctgcagcccggatctatctcctgggccatgtggctcatgctgttgaaatcctctatgcccagcactttattcttcagccaatttaaggacattccgctgcaaagagtagctccgtatatagtgtatgccttatccagggcatggcaaaaggtatgggtcctcagctctctgtcatattttgcttcctttatataagcggatatctggcccccggtacctatatttgagatgacctcaccttccctgaatactccatttccaatgctctgggccatctggtccccactgccatatacaaccggaattccttccttaagtccgcattcttcatggcattgtctggtaactgtccctgccacctccatggactctttgcaggcaggaaatatcttctcgggaagtccaaactttttaatgataccaaaggcccagtctcttttagctgtgtcaaacaatgcggtagccgaagcatccgtcacatccgacgccagattgcccgtcatcttgaatcggatataatcctttggcatcaggactgccccggcttttagcagcacttccggctcatgctctttcagccacataagggacgggaaagcaaatcctgtaaatgccctgtttctaaatatctctcccatttccctgaaatccagcacgctgttaatggactccagttcttttctggaacgctggtccagccatagaatagctggcctaagaggctttccctcacagtctgccaccacgattccatgcatctgaccggaaaaacccactgcctgaatctcgttgaattcctgttcatttttatctctcaaacgccccagtacctgttttgtctccagccaccatgtctccggattctgctccgcatacccttcaaatggtatagatacctcataagggctgctctctaccgagataacccctttgacgctgtctaaaagcatggctttcacgcttgacgtccccaaatcaattcccagaataactgacatatttcatcctttccggcgaaagattaatctttcatcttcttgatatagtcaataaatacagctatgaggaccactacaccctttaccacatactgccaggaggaatcaattccaaggatattcatgccattgttcaatactccgattacaatacagccaataatggtcccgctgaggcgcccaacacctccgctcatactggtacctcccagtacaacggctgatatggcatccatctccgaaccttctcctacattaaactgtgccgagaaggtacgggcagaactcagaatacctgcgcaggatgcaaagattcccataatcacaaatactgtcatggtcactcttctggaattaatgcctgaataagacgcggcctgcttgttatctcctaccgcataaatattccttccaaattttgtcctgttaagtatgaggcccgaaataacaatgactaccagcatgtatacaaattggattggcacccctcccaaaattttaccacttccaataaaagtaaacaatgggtcatctactaatattgtagttgccttggtatatatgcgggcaaatccccgccctatattcatcatagccaaggtcacgataaaaggaggtatagtggttctggatattacaaacccattaaacacccctaccagggttcctgcgcagatggaaataggaatagctatgatagatggaactcccacattggtaatcagcccgcagcaaagacatccggataccgctataaccgaaccaacagaaagatcgattcctcccaatatgattaccatagtcattccgcatgccagaatcacattaatggatatttgccgcatgatgttggaaagatttctcactgtacaaaatgagtcagtcatgacactcagcaatagacaaatgattaaaaggccaatgataattccgccattatacttaactgttgaaaccacattcctgccaaaaccaggcaaaatgccgtcactcttttttgcttccattttatcctcctgttttgaaacttatgcgcctatctcagtagtggccagagtcataatccgctcctgggtcagttcatctctgtttaaaatgcctgtactgtatccattgcacataaccagtaccctgtcactcatgttaataatctccggaagctccgaggaaaccataatgattgacattccgctggctgccagctggtcgataagcgcatatatctcggattttgtctttacatccacgcctctggtaggctcatccaatataagcaccgactgggtggaacatagccatcttccgattaataccttttgctggtttccgccgctgagctttcccactacctgttccggccccgtgacacgaatatgcatatcgtttatcttgccttcaacgatgccgtcctctgcctgcctgttccaaatgaaatgctttagaaatctgggaactacgttaatcgttgtattaaaccgcacgccggactgtaaaaataacccctgttcctttctgctctccgggaccataccgaatccattggccatggcctcccttggattcctaaaatccacttccctgcctttgaacctgacagttcctcggacctttcttctgattccaaaaaggcattccaccgtttcactcctgcctgcccctaccaggccggatactcccaggatttcgccctttctcaggtcaaagcttactttcttgaccattttgccgtcagacagctcctttacctccaggaccacttcatcctttgcattgtcattcttcgtataataactggccaggtcgcggcctaccatcatagcaatgagctcggccctctccgtctccttcatcctgactgtacccacatgttccccatcccgaagcaccgtggttctgtccgcaatatcatatagttcattgagcctgtgggatatataaataatggataccttctgttcctttaatatgcggatcatctcataaaggatatccacctccgcatctgacagcgaggaagtgggctcatccattacaattattcttgaaccgaaagacactgcccgtatgatttccaccatctgctgctgggcaatggtcaagcggtccagccttgtatcagcctttagctttattccataatggtccaggaatctctgtgtctcggcttcctgcctggccaggtccacaaaccccccagcctttttctgttccctgcccataaatacattttccgctatggtcatgtgtctggccagcatcagttcctggtggataatactgataccattatcacgggcatctgctacattatgtatctgaacttccctgccgtttatgagaatactgccggcgtctttggtataaattccgccaagaatcttcataagggtcgattttccggcaccgttctctcccagaagagcatggacctcgccttcctcaaccgtcagatccacatccagcagcaccttgttgccggaaaaactttttgctatgtgtttcatttccaaaaccgcactcaccattggcaccccgctctcttcatgctatataataaagggaggctggcccgaagcgctcctaagaacactccgggcccacactgtactgtcacgttcccgccagtccagcatcaaaggcctccacctcacctactgccagtctgacttgttatactggtcgatattctcaggtgttaccgcaaaggatggaatcttgatttcggactcataggattcgccatttaaaatcttatacgcaacctctgcgctcttttgtcctataccgattgggctctgggcagcagtacacttccagattccgtccactccgtcctttgtcatggctgcctttgcttcgggtcctgcattgacactgtatatttcaatcttgtcgcctgctgttgtgatagcggaataggcaccctgtgcgcactcatcattaatgcagaacacggcggtcaggtcactgtgggcctgcagtaaatcctgcattacagtcagtcccttctcaggttttgcccctgcatccatctgcgccaccacttcaaataaaccgtcagccgtgactgtgtccacaaatcccttggccctgtcagcagcagctgctgatgccgggaaatccaatacagctacttttccgccttcaggatgattcttaatcaattcctcgcctgcaatctgtccgcaggaatagctgtcgctcactacaaaacagttcaccttagaaaggtcactgacagctgagtcaaagtttacaatggggatacccgcgtcattaagcgccttgaccgctgccgctgacgccgctgcatctgatggattatagaataccaggtcgcatccctgtgaaataaaatcctcaattacacccagctggtatgcgctgtcagctttaccttccacgtggacgatctcatccccattggctttgaccacttcctcaacaccgctgtaacaagcatcaaagaaagagcctgcgctcatttctgtaaacccaaatttatattgtttcttctcttctgttcctgctgctttttccgtttcgtctgtccctacaccttctccggttttctctgctgtactttctgctgccggtgctttggcagccgcggccgttgtatctttagctgcagaccctccacatgctgtcaagctggctgccatcatagctgcaagaacaactgctaatgtttttttcatgatttttcctcctccaaaataatcattttttgaatatattcattaattggattaattaataagttgagtttatattacaacagatcagatattttgtcaataagtttttaaaaatacagcattccaattttattatttgctattttgcacaaaaacaaggctgtggtttgtgcactttcacagaccacagcctcttttatgtatcgtcttcacacgcctaatttagtcgtctctttgattactctcaaaatatgttaacggatgattgaaaatatcatttatcgccacaattgccgccccatgtgccatagaatcattgctaactacgctcatggttatattcatattggcataaatttccggcagcacccgttcctttatattgctcttaaccctttccaacatgacggaaggaaggatatgggacatttcatctcctattacgatgactgatggattaaaactgttgatgatattcacgattccaacagaaagtttatcacaagcatccagaaaaatatccgtaaccacctggtctccatctctcaggagctgggaaacctgacggaaattatattctatttcaggtcttaatacgcggttcacctctttggtaaatgcaatggatgaacagtaattttccagacacccataattgccgcatgcacatctgggtccattgtaacagatagaggtatgtcccacctccccggcaacaccgatgcagcccttcagcagctcaccattattgatgataccggcaccaacaccctgcccaaccgcaatatatacaacaactccatttttataatcttcatcattatgccagtactgggccagggcacctgcattggcatcctgttctaaaaaaaccggtattttgaaaatatcctgcagtttctcctgtatgggaatttcattccatcccaaaacgcctgtcatcagctcaatccgccctcttttttcactgtaaggaccgggtatggccatacctatggctatgattttcctggattcagatgatctgatgagttctccggcctcatggattatggcttcaaaggttacccttggaggctggttcacatccagctccacccgcttcttatccagaagcctgcctgacagattgaaaatacctaccgtataattttttctggcaagccttatggctaaaactccaaagtcatcgttattaatggaaatacctatggatctgcgccctttgtttccaactaaaaatcccacctcttttaccaggccccagtcaataaaatcactgacaatattagtcaccgtggcctgttttaactgggataggtttgccagatgggctcttgcacaaattccttccttcctgagaaggttaaggagcagcgtacggttcatgtcctgtatattctcctgattaaaaccccttatacttctgttcatacattctccctattcattaattgattttaatgaattaatccaattaatatattcatcatacgttgccacgaaccgattgtcaagacaaaaataaggaagaggggggatttattatccggcctcttcctgctgccttcactgcaatttaaactcaaacactccgtttcttcctcatccgaatcccaatcagctccttcacatcctccagcacttccccgttccttacctctatcatcatccatctccccccattaaagggagtagtatcatgatacagctgccggacatacgcagtgcagccgttcagtgccagttctgcctccggtgcttcctttgcccccactgaaatcatgcagataaaatacccttcctctggatacaatgtacagactgccctggagcccttcttatacttcacattccagcctccctgcatggagcatctgctgtactcaatcctgggggatatatgaaaggtgtcctccagccacgccaaaagcggctgccagcagggacttgctatataccttccgatttgctccatgtccggctgcctgtgagccgggtatgcctccatccatgtcattgtgtaccttcctttcgttatgccggagaacgaagggagacagacccggccgtgatgaaaccccatcataaccggcgcgtctgccggtccggtgccgtgtgcctccgtatcatatatctcatatatctgtcatttcaaaattatatcacatataaaatgacatctgtatgtcatgtttttcctgcatcaggcccggtcctctacgacatcatcacggtacggtatgcatccgacctcagaagccctttaataaactcctttgcctcaggcccggtacggtaaaagggcatctctgcaaatatccgggactggccgtcaatctcctccataatggccctgcactgttctgcaatcctgctccgtccctgttccatgccgttgtactccaggcgctccggtgtcagccggcggctggcaatagcataatccacgcgccttctgcagctgcattttcctcctgccagaccgcagtattcccccaaaaatgccgccatcttttcccttatccgcgataatctctttctgtacgcggccggtgatattcccagaatctctcccgctactgcgctgtccagccggaacatggttcccagaataaagatacatctgctttccccatccagacactgaagcattacattggtgcaggacaatttcagttcttcttccagaataccgcggtccactccgcctgtcatatccggcacatcctcttccctgccgttagctatgtcttccccgtaatactcgaaactcagaggatggtggctgaacatatgcttcctgtacgcaagcacatgatttacagcaatgcggaacacccaggtgctaaaccggctttccttcctgaaatcagacaaatgggtcattactttaatcagtatctcctggcatgcatcctctgcatcaggaaccgttcccagcatacgaagggacaggttaaacaccatgtcctgcacatctcccaagagttcctccaatgcgtccctgttccccgacgctgccaggtcaaccagcctttccatatcatacttttcctgtttctccatagctttccgcctccttttataaagttagagggaggacactgctggtttgtgacatatatttataaaatttatgtaatttatgaaagaatttattcatcccagtccgatgaccggtatatcaccggcttcccagccgccggacaccatgctccgatatcaccatatccatcagctggtcgtggggctccacaggtatatccgcacgcatgatccgttccctgcatatgaccgccttcacggcccgggtcctgaccagatagcggtcatagtacccgccgccgtaccccagacgcctgccgtcatggctgcatgacatacatggcacaatggccagattaatttcctccggctgtatgaccggcgcatctttacccggctccaatataccgtattttcctgcctccaaatccccaaggctcctgatttcacgaacttccatgatccctctggccgtacacttgggaacgcccacccgttttccctttcttaatgcatcctccaatatgggcgctgtgtcaatttctccgctggttcccacaaagcagaacagagtccccgcctgctcatattccggcagccccgccacatggctgaatatctcaaggtccgcctcctttgtataaccttcatccaacgctgctgcagccgcttttatctcctggcgcaatgcctttttccgttcttccaaatccatagatgtttcccctccctgttggtattttcctaattatacacttccccatataggaaaacaaccacctgaaagaccggctggaaaacaggcagggaggtttcgcttaaggacatgctggatgccagggagcaccggcaggaggtccagagaatgcttctgtctgaacatcacctgcctgtcatctcctttaccctgaatattgtaggacccgtcaaggtattccctctggctctgcagacctttcacgaaggcatccgcctcattgaaacccagtgccatgcatggaaaatccccatcattgccacctattccaccacatcccatgcgggacatgagtatttctgggcagtagacggggatgcccggtttataaaagaaaatctctgcctgctagaagactctgttgcccttggcagactgtttgacatcgacgtgattcagacagacggaatgaaaatatcccggacagacctgggattttccacccggaaatgccttatctgcaaccaggaggcatttgtgtgcagccgtgccaggacccattccgtaaaggagctgctggagcaggaatgccagatcatgactaattattttgcgaaacagcatgccaggaaactttcctccctgtccatgcaggcgcttttatacgaggtcagtgttactcccaaaccgggactggtagaccggaacaatacaggagcccatcaggatatggacatcttcacttttgaggccagcgccgtgtcactgaatcactactttgaacaatttgccctctgcgggattgaaaacggacacgaaccattttcccgtatcttttccaggctccgctccctgggcatacaggctgaggaaaccatgttccgggccaccaaccaggtaaatacacataaggggcttatattctccctggctatcatgaacggcgccctgggctacatgtatgccaaccacattccatactctccggacgccctccttaagataaacaggaagctggtggcagacgtgcttgaggattttaatgatgtgacggttgaaaatgcccgcacaaacggagaaagactttatgccctctatggcatgaaaggagccagaggcgaggccctgtcaggttatcacacagtcttaaagaaagctcttcctgtactgaaacatcagctggacaggggcctctccctcaatgacgctggcgctgtgaccctgttatatattattgcccactcagaggataccaatattgtaaaccgatcctcctatcattccatgaagaaaatccaggcccttcttcgtgaaacgctaaatgacccggaattcataaacaaggacccgattccttatattgaatcattggacagggaatttattaaaaacaatataagccccgggggcagcgccgacctgctggcccttaccttctttctttatctgtttgaaaactcagggctttcttctattttatagaccacataccctgcatccttaacagcctgtttaagctcattgtttccgtactcctgtttcatccgcaccagggcctcgcctttttccaggtccacctgggcccacactccttccaggctgttgagtgcattttccacatggctggcacaattaccgcaggacataccgtccaccttgagaagccgtgaataggggtaatgggacttatccttatccctgactttcatttttttcaccgatggctgggaggaggccccgcagcacccggaggttaattttttggcgtagcttttgattccaatgattgcaatgacaatcaggaccgcgcatataatggctgttgacataatatcaccttccttttgcttggctaatgagtcgtttatgtgataagattagcattgactaaccaaaatgtcaattccttccttatataatattttctataatacttatctttccgctttttctatcccaaatcttcctataccaaaacaaatgtgtcccggaagccagccttctataataaaaggcagcatccaggacacctatgcttacgctgcgggcgccgggcccgcttatattttatctgattatcttaccgcacagctatttctctttcatcaaagccttcacaagggcagcccctgcaaacagcataatgaatataaaggggaatgccgctgcaagcgaaatagtctgaaggggtttcaatcctcccgcaaccagaagtcccacagccagaagagactgtacaacgccccacagcacttttcttccgttcttcggattcagatctcccttggatgagaacatggcaagtacaaaggtaccggagtttgccgaagtaatgaagaatgtacataacaatataagggataccacgcacagaatcattcccagaggatactgtcccatcacaatgaacagtcctgtctcaggcttgcttgcaatatctgccagctgggcaacggaaagtgtaccgtccatacccaaatgcagtcccaggcttcccataatggcaaaccagaggatggaccccagggccggtgccagcaccacgcctgcgatgaattcccgaattgtcctgcccttggagatacgtgcaataaaggatcccacaaatggagcccatgcaatccaccacgcccagtagaacactctccaggctcccacccaggtattgtctccataattgttgatcatgaggctgtccccgaagaagttctgcagatactgccccagtccgtttgtcaggttgttaagaatctcaagttttggccctaccaggaatgtaacagtgatcaggccaatggcaatatataagttagcgtcggaaatgatcttaatgccgcggctgatgccgtcaacagcagaccagatgtagataacgcttattaccgcaatgataataatttgaatcaccagggtcgtgggaatgccgaacaggtagttaagacctgcattgatctgcataacgcccagtccaagggaagtaacaacgcccgctactgtggcgaacactgccagtacgtcgatggtctttcccacccatccgtttattcccttttcaccgatcaggggttcaaatatggaactgataagacccggttttcccttgcggaactggaaataggcaaggcccaatccaatgatgcaatagtttgcccacggatgaagtccccagtgcatatagctggaccgtatggcaaaatttgcggcggcttctgtgccagcctcaattccgggaatcggatttgaaaaatgcgccagaggctcagagattccccagaataccagacccacacccatgccagccccaaacagcatggcaaaccaggatacagtggaatattccggcttggagtcatccggtcccagcttaatctttccccatttactgaacgcaattgcaacggaaaaaataacaaatgcggtcatggccataagatacagccagccgaaattattggtcagaaatgaatatgcagcatttgaaacaactgtaaagttggcattaaaggcaaccgcccatattgccatgataatggttattgctagtgaaactacgaatacctgatttttgtctttcatataggccctctccttctcctaaaagcatgcggacagccggcaaaatgattctggacagccaaacaaaagctctcttgaaaacataagctcccaagcaaacacaaatgccgcctgacaggcccccctgccaggcggcacacaaagccactcatcactcatggcatacagaaccgtatttcgtaccgccctgtatcctagatttctactttgaaaatcgtctgctttttaatatctgtagccagtgcatccagcgctgcctccactctggagcggcgcagcaaatgctgctcctccttggaggtggaaggattgccaagaggataaggtatggatatagttggtaccatacggtttacgccaaccgtctgggcaaccggaagaaggttgcacataagtacaacagggaaacctgcgcgctcaaattcttttaccatcgttgacccgcaacgagtacaggtccctcaggtggagaccatgatgacggcgtccacatggtcctcctttagaagcggtatgatttctttggccattcttctggcctctccctgtgtggttccggttcctacggttgaatagaaataatcgtggagagaaccatatttgccctcattcaggaattccttcataacatccacaggcataatgacgttggggtctgcgttggcagccgccgggtcaaaaccagcgtggattgtcttaaactcgccgcctgctaagcggtccatcttggaaatatcatatctgccccagcgtgttgcagatgcggactgaatcctgtccggattgtccacaggaacaataccgccggtgttggccaatgcgatcctggcatgttttaagtccttaagagccggtgcaatgggtaccaggtccttcttgggaataatcagctcagactgatagggctgtcctgtagccttggcaatgagcatatccactgcgcggtctgctgctgccacgccgtcctcgcgccatacctggtggcggattcctcttgcatagtagccctctgcatccggtccctccggtgtctggccctttaacagcttatcagccagctttaccatggcgcctgcatccttcttcatgctggctgcggaatggctgcctgtcatgacgtacatatccttcttaaacatctcaacaccggggttctccgcatgcatggatgtgatgaccggtacgccgaacctggcggaaaccgcttttccaatctcaccgcaggcaactccgtagcggcctgcctggaaggctggtccggccaggaaaagatcaaactccctgccctctaatgcggtcagaatcctctcaatggcttcatccctgtgtgtgctcataaagttgtcaccgcagataatggtggtggtaacctgggcgtcaatctctgccagcatctggttgatggctgctgtgggtcccatgacgccgtctctgatttccggttcataatcagccttgtcttcgccgccaatgcctgcaaagaactgattgatataacagataacgttcttcataacgaaactcctttcactgattttcctaaaattccctgacagtcttggtggaccagccgataatctggtctccgcagaacatggcgttgttttccatgatgatggatccatccggcctgacagacggccctaaaatctcatccccggcccagcctcctgacagaccatccctggcaagggcttccagctcgccgattacctccggcataggaggaagttcaatcaattcagaaacattaccggtagaaacaatggcgtcttccttctcatccatggaaaccaggggatcggacttgccgtcacggcctgtacactcatttgtaaggcctaccgtcttaacgcctgcatcctccaaagccacgatgcagcctgtaaagtcagcgtccggattgccgtagccttcctcagtcacaagggcagcgtctgctccaagggacttcgcaatctgagccacaaacagagcggaacgctccttctgctccagggcaacgttcaggtttgacataatcactcccaggaagttaagggtcttgccgtgctccttgtacagcctcttgatgactggacaattctggaaatcataggttgcccacttggaagagcatggcataaagcttccggaaatcatagctccgtccaacacctcgttggggttcatgaaggtgggaagcatatggttgcagtcccatccatagcagagatcgttgtaacccatctcctccatctgggactgaggctgcatcacgtacacgacggatggaagcttctccgtctcaggcgctctcctgataaccggctccagctcgtagctttcaacctcttccggctccatatcctttacacaggaaccaatgtactcggcaagtttgtgaactgcctccctgatggccctgtttttcttctgctgttcccgcttctcaaaatcctcgtctgtatctgcaaccagcacaagattcttaagctgggagaaatatgtatatttagcgccttcccctcccatatcaatgagtccgtcctggaaacctccccagtgtcttccaacagccaaaaggctcatatccttcaggcagtgggtccttccgtctccggcctgtgacagtggtcctgtgtaacccgggaacagtgcgtccccatttacctttactctgcactctaccgcctctttaacaggtaccagtctcaccatgtcaccaggctttactattcttaaatctgcctccgtgatgtgcgggtctctcttgacaaaggcaaggcaatcctctttgtctaccgtaaggataccgttctcatacttggttttgtcaccaaaaacgatgtcctttacataaaaattaccgagttccagcttcataaatgaactactcctttcttatagaaattttctatagttctggctcttaacagttaatattttaacattaactgcctggtttgcaaggctttttgtgcattttgacgattttcagaacattgttggataataccatggtaactttatgcatcatgtaagggactcgatattttcaatccattccctctgtatctcaaaacatacccccaattcgtctgccggtgaattgggttccagttcaaatacccggtcccagctggaaataattctctttttcagcatgggataataattgcccagagactctgtgacaagagccatttcattttcaatcccgtatcgtttcagctcctcgttaaacgcgcgctcatcctccaggtttaacggcacatacatataattgaccctgaacccccaggcatactcagaaatgacatgaaccttttcccggggtatcctgagggtgaagcacaccgtatcctctgtgttcctcagcctgtattcatcatgcatggacagccatatgggaagagaacacccctgcggaacatcaattctctccctgcaccgttcagcaaaccaccggtaaagtttcaggtaatactctgaaatagagtcatttttcatcctgatatactcctctttaacccggtattcccccgttttttccagctcctccagcacctttttggactgcctggtgtaaaccgtataatatccgtttgctgtctctttgctcatatcaattcctcctgtctgcatcacctatattctggtttcataaaaaatgagccgcggaaatctcttctgacagccgcggcagttcatattgtttctgatgtttttctatctggcatttgccagataatcatgacccagtgtatcgctggcatatatacctacgatgacttccacatcacgcttaaactcctggaccttaccctcgatttcatccggttccagaccataatccagaatctccttcaggtaccccttatacaaaaggcagaccatccggttcatattcatggcattccccatggtaataacgcctgcctgggcacagcgctccgccatgaccatatcacgctcaaacaggtccgtggactggagcatgacctgaagatatgggctgactatattgattcgttccggaaacatatcatagtattcacggatggctgtggtcaggttccggctggccgcgctgaaaaatatgatatcaaaggcctggggatagcggaaggcaatacggcagtagcattcccatatgccaatgtgcatgtcccagatatcacgccactccttctcatggacattcagctcctccaggtactcatccagataccccaggttggcataataaagcagttcctccacattctcaaaataccggtacatgctggtggtgctgcactggaattccttggccatcctgcgtatggaaatggcctcagtcccctcgtccctgatgatttccaaggccctctctatgtaaacctttcggtttaaatccttaaaatactttctcctcacccgttcattttccactgaaaccatccctttcttctaaagctgaatgggaattaattcccaccacatcctcttgtctgagctgccatacggcggctcccaggttagtctgttccgtattgtctatgtcaaatatgcgctcccaactcttcttgatttctgacttcaagtatgggtagaaggcggactgaaacacttcccagtaagtggacacacccatctggttcattttctgttcaaagcgggcctcgtcctcctgctccttccccacataggaaagattcagaaccctttgccacctttcacggtcaaacagcaccacccgttccctgggaacagacagttccagcagataactgtccggagacaaatacacccagcctgggtcgaaaaaaagccagacaggagattcagctccttcgggcggtttgaccatgagcctggccctctgtttaaaaaagccatacgcctccttaaacacccaggcgctctcctcatatttcttgtcaataaattccatctttacctgggaaaatccattctccctgatacaatcaaggactgcatctgtctgagctgtccacaaatgcagcatggaacccgggctgaatccatcctccttattattcctcagcatatcaacctccataggcatattcctgactttaaactatattttcagtgtacattgttttataatatttgtcaaaaagaaaacgaaatcccttcccggcattgtccaatgttctaccatatgtccctatttcatacagtataacaggaggtgcatatgaatatttcactaacaatagccgggatactgtgcgtatccatactggggacccttctccatttcacctaccgctggtccggccgcaatcccctcatcggccttatcgctcctgtcaatgaatctgtgtgggaacacatgaaattgctgtttttccccatgctcctgtttggactgtggaacctaaagggagtgaccgatgcctgccgcatatctgcttttcacgcaggactgctcatggggacgctcctgataccggtactgttttacgcctatacaagcgtgctgggacgtaacttcctggtattggatatcgccctgttttacatttgtgtaattgctgcctttctcatataccgcggattgtcagggagctgtcgattggaaaaatacagccatgtgacatccatggccgtgtttcttttattgatttgttttctgctgtttacttattttccgccgggattttctatttttaaggatccggagaggtgacagagcaggacagatccatgatggcttgctgaaggtgcggcgatggtatgacagcttttccggaattataatgcgattaaatactgaccggaatggtgctttgaaacggcccggtattgcccgtaacaggacttcaaaatagttcgttatcgtccaatttgaaatgtataaacagtctgttttccacagaacatatatgctgatttgcgtaagctaatgcccgccatatatactgcataatcttatcatacagtacatctgacgggcatttccaattcgtcttttatgcagatcataatgacgttatacacgggaaatacaggtcttatacaggtgttatattctcataatttgaaccattcatatccgtcaaaccagccgatttattttaccggaccggctcatattccatggcagaatcctgtccggcagactccactttgaatatgacaggccgcagtccgtcattgcagctgcatatggcgactcccggctttctaatccagtttccataataaaacagttcatttcccgtaccatggaccagggaaaatacatacggatgaatggctatccatgccccatcacaaaacccttcaggcttagcataatccacataaaatatctgcccctccttcatcaggggacaggcagtaaggccctctgctccgtattcccgggccagctctttgtccagggtggtttttaaaacagttatctttactttactcatgttctcaacctccttttgtcactgcggtttcccgctgatataatatcaaggcagcttaagacatctaatgtcgctttaagccgcctaaactgacagtatcaataaaatgggaacgggttatctttactttccgcaactgctccgacataccctccccatcttttttctcccgtgcacattattatatttacaatcaatcatttggttccctgattctgattaattctattttgcctccgcaagtcaaccgctccgccatagacttcacacccaaaatttccgtattggtatgacttcccacaaagagattcatcccgcagaatccggcatattgctgtgaatacagggcatattcccctgtaacatatgtatcacatcccagctccactgccgtcctcatatcactggtcatattgcctccgcccgcagccacagctatccggcagaccggcctgtcgttattccgatgacagcgcacattttcctgcaatatatgggaaaggctcgccgcaaaagactcaaaatccgtgggaacaatttcaccggcaacacctccataatactgctccctgtatggcatgacctttttacagcccttcatccccaatgcctgggccagcgatgcgcttgtaccaaaatccgcatcgtctaacggtgcatgaaaaaaggcatgtgtcataccggcttcccgaagcattttattacaatgttctttcaatccatatataaattcccaggagtcatggtgggtaagaagaaaatccacccctttttccccggctcgttctatgatttccccggtaagatttgtggcatatccaatgcacttaatatccctttccgtttcattaaaaaatccccattcttccggaaataaatgcagtttgtcagagtcaaacatactcagaagctgctctttcaggtatttatattccattgttttttctgtttctccttatagttatattttattattcttcgctttattgggatttgtttctttattttgttccggtttattcctatagtttgcttcgatttattcttcttatttactccgatttatctccctgactttatatattttaacattaattccccatttcccgtacgtccgcacagactattaattcgcatcatgacctgaactttatcacgctcaatattggtctctctatactgttcactgtccctgtttacaaccacttcttctactcttctgtccgtggaaaactgaaccttataaatacaaatgccactccagctccggtgaatatacaggatattattttcaaaatattcaaaccacttatcctccatttcacatggaatatgaccattttgaagtgcggaaaattcaccttctgtcagactgatatcaattgaaaatgacgctgttttctccggcatatccagtgttttccagtctgtttttatggctttattcatagtaattacacctgcctttcagtgcttttgataactcttgaattaccaggattaaatggaacattacacgcattttcatccctttacattatgattgaaacggcagtttttcgccaaataagaatagttgatgataaccgctttttctattattcttcccaggtatatcctccaccccacaccggcagaggcattggaagtaccttctttcatatagtaataaaacatccgcccattgccaaattccggggtacaaaccgcctcttgctcaagtgcctccaggtcctcagtgaagaacccgactagcggtttctgctgcatttcggacagcgccttcctgtgctggtaaaatgggccggtgccacagaatattccagtccgcatgcattatggcgcatctttacatgagcaaaagcattctgatattctgataagacagtgtattcttcccccaccagagcttccacctgctgctgaaattgctccggcgtcttctttttacacgggctgatacaaatatgatttcttccatgcataactgcactgggcgtcacctcccagatctccccacaatgatggcagcggaatttatggggtactccaagcctcgtgcatacatcgctttccaatgtatatcctcttgcttctatttcagggagtttctgataaaaactctgaatctcgcgatttctcctggtttctgctgaatggataatacgattccgttttccgcaaaccggacagccacgtttcataaaatccgtataagtaatctggaatgtttcattacaaaccgtatgatacattgtcatggaagttttacaatttttataaatgctcagaacctgtatttcctctccgtatttctctgcaattctgcccttaatacgtgcaagctgtttacagtaaggacaagcgtgatgctccataaaccatgtagcagagcattcaaattcctgcccgcactgattgcagaggaaccggataggttttcgggtatttacgtaagaacccaacatctgaatctgtggatactcctgttcacagcagatacaggatctgctatttgattttagttcctcattcggtctgtactgcattttttccaaatatttcttctggtcctgcagccgcattttctgtttcaaatatcgaattcttttttcctgtttatgctgacgattttgttcggcctgttccactcttggacatcttccatcaaacagaccgtccgcctcagcctttttcaatttttggcagactgtagaagggtgtacctgaagcttttcaccaatctgtttctgagtgtatccttgtttggatagttctatcatctgcaataccattgaggtatttgcgtcctgtctgaccttcccccaatccacaccatctaacggataacatgctaatttacttataatctcttttcgtatccaatccggttccgattttctgcaatccaaatatatatactgtaaatgcagaacttcttttgcaaaccgttccttctcccgatcacgttcctgaatcatctccaacgaccaccctccaatccgtttgaaaacatctggagcaaaatgctgaaggccatgtacttccaaaagaattccttgcggttcatcgtaaaaatcgtatttataatgacttctctttccttctttttcaaacggtaccatgtattgtctatgaaaggagatattcagctgtgccagaaacgcattgacataccgttctggataactcataccatctctgcaataagggcaagggacatattttctctgataaacagtatgaatactcttgtcccgcaccaatgagccgcattcctgacaataaaagtctgccagtgtatgcgaataacggcttctctcccttggaatctgcggttctgcaaaccataatgcgaaatccggatccgtctcagcaatcggaggatgataacaatgtttgcatgtgcgcagacgcccctgctgcaaatagctttctccaacctcatattggtggccccttccgcattgcaaggtatagtatttccggaaatgatcaggttttttctccaccttttgtcttgcaattacagccatgctgccatgttttgttgaaaatacatgaccaatctcataagcatactgtccgcgtttttcattcatggattttgaatcctttcacctgttctttccctgctgcttcagtgtgcttttttcgttaatgctgcggccgcttcgtaggaagcgtgaagattctttccagcaagtgccggtaaatacggcgtagaggttgaccacaatccaatgcacgattctgttcccggcccggtcgaagtgatccagctttctcaaaaattcttgattgttatcgtcttttcccattaggggatttcttttatgaaaacttcatatcctccgcctgaatcgtaatgcgctctcgggcctcttcctccgcattccaaaaggacattggatgaaaaccgcacaatcccgcgatgaaactggccgggaacatctggatggcgttgttgtatttgagcacggtgtcgttatagaactgtctggacagggcgattttattctccgtatcagataattcgctctgaagctgcataaaatttgcgtttgccttcagctccgggtatgcttcactcaccgcaaaaagccgccgaagcgccgcctggagcttcccgttcgcggcagccgcctgatcgaagtccgcggcagccatcgcgctctggcgggcctttaccacggcctccagagtgctccgttcaaagttggcatagcctttggccgtttccaacagattgggaatcaagtcatagcgccgcttaagctgtacgtcaatctgcgccaactggtttttgacccggttttggagtacaacaaacccgtttctggtcttgatgattacaaggaagataaccgcgacaatcagaacggcgcctccaataacaatgtattttcctatgtctcccattttatgttcctctcatttcttagaaaagtataaaatcccgatatttcaaattccttaaacgaaaaatatcctcgataatgcgttcgttttcctccagcaccaccgcataaatcaagaaatcgtcccaaaggacaagctgttctttctccgattcagccaagttagaaaagtcacggataaaatttttaagcccccaaatctgcgccgttaaaatctcgcccgcctgcgtcctcttaagccgtgttcctgtgccgtaaatggacaacgccgtgcgcagaacagccgcaatcggaagcagaaacattgccagaaaggacagaacaaaaaaagcggtcagagggatcgcaatcaccatatccggcgatgacaaaaggtattccatttgtctcataccgaaagactgtggagccgccgcaagaaagccatctagcttttccatccagtcgctgttgttaatcgcaacggcggtgatacccattccaaggaaaatgaggatagggagcagacatccgccgaggcatcctgttagacaggatcgggatgcggaatgtacattttgccgcatgcctctgtatttcaaattgcctgactcaacggcctccgtgacggcctgcctcctccacgcgccaaggtttgcaggctgtacctgtcccccggcaatcagcgccagaagcgtccggtcgctggggagcagtccgggaagctcttgattttgcacatgaaccgtcccagccttcatggaaaccgcgcccattttggtatattttaagagtaatgccgccatgtctttttttgcttcaatctgcaaatccatcaagaggctgatagttgcgggcggaacgccggtcagtttttcccggtaatagtcgaaatcctcatcggcctgaaaggtggcattttgaatcgcggcttttttcatggtatggctgacggcccgccatataagtacaatcggcagagaagccaagacagcggccagagccaggagaagcagcgccgcaatcgttaccacaaaattccgctccctcagaacgattccccagagcagccgcccttcttttccaatggatagaaaaagaaacaggaccagcggcgcaagtagagccagcctgtccagcttctgccaacgtttcatttgttttgtcgctattgtttttttcatggtttactccccggtataggaaatgatgttgttctctgttgcttgtaaatcccaaaggaagcggggaacgccgatttctacaaagcggaagtatccacatagtagtaaattgtgtatttgttcagcttacgcgcgccgctttgtctgcccgttctgcgggtcgaaatactccacgtcaatccagtagttcggcacgcggcggtaacagttctggaacgtttgaggctggcgcccacactccatgttcgtccacatggtatccatccggagtaaaggtattcgggtgcattcttcctctcgttccattcggtttttcatggaaataatagtattttccatcaatcacaacccagccgagtctccatctgccgtcctccattgctttccagattacttcttccacatagctggggactttgacgttatttatgatttccgtctcacctgtatgatttttcggcaggctttctttcagtcctccgaccgcggcagccggacctcctgtgcttccaccagagccacccatactgccagaaccatctgtattcttccaatgagcataaatggtaccgtcctttgtgagtaccgtatccacagttacctttgtgcctcctgttttcgctgtaaaccagccgtcaaactgataatttccactacgaatcgggattggcagactgccgttatcattataaatgatgcggctgccctcgccgtctcctccggtgacagttccgccggatatggacgtatcacaaagtcaagtttgatattcgagtatgcctccccagtcacaaacaccttattgtcctccgctctggcttcgataccaccgtcagcgcgatggaacatagtcttctgcatcgtttcttatccctttgcatgttgtttctcccctttgtgtatttatgagtcagccaatcctccagctgactattcctatcataccttattaaataaatacacagaacaactcctgcaaaatcatactatgggacgcaaaaaaagctcattcatttccgtcttcacatatccggtatcaagacagtcgctttcacataatccccctccgcctttactacaaaggtcccatcataccgcccggcaatatcctgaatagccgccagcccataaccatggttttcttcatccagctttgaagtcatcaatctgctgtcttccaggtgcagctgcccggcataagagtttttcacggttatcacaagctgccgtttttcccggacaatccggaccaggaccattccttcagactcgcatttttcagccgcttctatggcattatccagcaggtttcccagcaatataataatctcatcttcttttaatatcatatcccggagatccccgcacatgaggtttacgtttacacctctgtttaatgcttcctgccttttcatattcaaaattgcatcaacaaccggatgattggtgtaaatgcgttccagcgctttcccaatctctccagtcaggccctgggtgtattgaagcgtctgggataccagcccctgctccagcatatcactgattgtcaaaagctggttcttatactcatggaggcgttttccctgttttgtatacagctcctgtttattttggtaaattagaagttccatctttgtttgacgggccgcgtccttcaaactgtttttctccagttccactcttgccgccaacagcatattaaaaaccagaaaaatattgagtcctatcatgccagccataagaaccgtcacctccacaggcacagtctgcgtccgcatcagaaactgtgatgcaaagattcctgcccccgcaatgattacgaatgacggaaacaatgcccgtattccctctgaacgtatggctgcattcccgccttttttccaaaaccatcggatcaaaaagccgctcccaagctccgtactttttaccatcaggcacatgaggtaaaacattggcatattttccgaagttccaaaaatatagtaatatccggacacaccaataaaatcaatacagataatcaccgaataattaattacatatacggagagcgcctcccctaatgtagtttgataaaaatataaaagataggcataaacaagcaaaaagtcaaaaaacagcttaagtgccacaatatcctcaaacagcgtcacactgactgacataaccatggtcaaaaagagcagaccaaaaacacgttttgatctgcttcccgatttcttttttatcaaaaaggcatcggccagaatatccaggaaaagcatttccataaacacccacagatgcgtcagaatataggcaatcataggctgtctcctttgtaaatggcatactcccgttttacatacggatacctgtttctagggacgtgcagaataatatccggctccagttccaggcggtagcttgcgatgtttacaatatatttcatgttaaccatataactctgatgaacccgcagaaacccatgtccgccaagcaggccctccacgtccgtcagcttccggttcatggttccgatgacatgtttgccgtccactgccagaaacaaaagcttatgccccctgctctccacgagacagatttcatctgctttcagataccgctttctatcagtaaattccagacagatttcatccgtatctatatgaaatttcttcagcaccgcttccatacattcctcaaagctaatctccagggaatccttcaccagatagcgaaacgctccaactttgtagccctccagcacatagtccatataacccgtcacaaaaacaatgcaaattttccgattcctgtctctaagatactctgctgcatccattccactgaccgcattcatgctgatatccagaaatgcaatatcaaacagtctatcttcattgtgcttaagaagctcttcccctgaacagaatgcagccatctgaaacggtatctctctgttttctaaataaacggtaattttattagccagcctgtctaaaaatggtttctcatcatcgcatattaaaatattcaacatactttttctccatgtttcgtattttattgcagccattcagacggcaggaaaatgccgtctgaactgttacaacttatcttccgcaactatcttatcacaggtttcttttcctgtcataccattatcataccttcatccttcaccatttttttaccgtaaacggcatacataaaataccaatcaaaaccgtaatcagtaaatacggggaccagattaatttaccaaaaaccaggtatgttccagctccgcctccatgccggcggcttccatactctggtagtcccgcaccagctgctgctgcgtttcatccgtcagttatactccaaaggaacgcgcatattcctggttgcctcttatcactatgtatccatcaaaattgttgccaaaagcgcttgtgtggtcaccggagcttccaaagctgaatcactggagggaaagtacccccaccccttatgcaggttgaactaccacaccacgttcgtttgatacccaggagattgaatcggcaatgagaaatgctggaatccatgcaaattcacctttggaggtacgtagaatgtacaacgcagtagggattgatgtttcaaaaaagcaagagcaccatcgctatcctgcagcctggcggcactataatccgcaaacctttcaatgttccccatacatcccagaacctcattgaacttgcagattaccttggttctttagagggctcaaccaaaatcgttatggaatgtacgggcagataccatgagcccatgcttaaggctctgtacgaagccggattattcgtttcccttgtgaatccccacctgatcaaaaacttcggcaacaactccttgcaaaaggtcaaatcagatccggcagacggccgcaagattgcacgctatactcttgacaactgggcagaattgcgccaatattcagggatggacaatatacgtactcagttaaaaactttaaactctcaattcagcttctttatgaagcaaacggttgccgcaaaagcaaacctgatagcactgctggataatacttatcccggtgtcaataaactctttaacagtccgccacgtgaggacggaagcgaaaaatgggttgactatgcctattctttctggcatgtggaacgtctccagatttacccacagggaagcactaaccgcctttgcatgcgttgaccccggcgtggatgagcccggccagcacaagtccaagagcaacagggcttcaaaagttggctctgccaggctgcgcaagaccttatttcagatcatgacaacgctgctccagaatgcccctgaggacgattcggtatatcgttttcttgataaaaagcaggtacaaggaaagccttactatgtctacatgaccgccgcagcgaataagttcctccccatttattatggcaaggtcaaagagtgcctgcgaaacttggagcaggcagagtaacatccgtttctatacacaaccccacccaccccattttttcaaagccggcggttctggcggcttaaaagttatgccctaaaatatcaaattttatgcggacactcccactttttaatcactttagacaattcatgattacactaatcatcatttctttttcctctggccttgattccgcaatcataattgtcaaagctaccaaagtatgatcagaaattatcttttcatcatccagaaacagcgcctgatttctatccataaaatataagaaaatagcagcagcaatccttttattcccatccgaaaaagaatgattctttgtaataaagtataacaaatttgctgctttttcttccaaagacggataaacttcctggcctgcaaaggtctggtaaattgctccaatacttcccttaaaagaatcatccttctcattaccgaaaacattactggactctccatagctcatactgtcaattactttccgacactcttcgtaagagagtatataaatagtattcccaccttctggccgcttcatattttgatggtcatatgcatccaacaagtccagagctaagctatatttttcaatcactgataaaatctgttttgcatccaactgttcttctgtccgtttcataatccgcaccacctcttttaattgatagttgcggtctgatcctgcaactcctctttcagcgcattgttaacatgttttccaatcgtttttacatcacgctcaaataattcagccatctgattacggtttaaccaaacggtatcctgttccggcgttatgggtacttctaacgcaacattgccatctgtaaataaaacaatttccttcttaatgcattaaacaaccctgtcttaattattttgcatgtctaaaacatttttgaatcaatatcaaatatatcttctgtttccatacaatcctttatcatattctgtatcgctgtagaattattcgaattattgtaagctctccacatccatctttgtctatcctctttttcattttcttgattaaaactattcgcagcctccaaataaatcatagtttctatcacttttggaagctttaatctattagctttacgttatacttattctatcacattttatagtcttttttatcagaaaacgtcattaatcattttataaattataactaaaaaactatgcctgttccctatgtttggaaaacgttttcatttactattttttgtaattgtcatttctactgattagcctatttcatattttcgacaattggcaacaatcttccacatgtctcgagtgtataaaaaggatgttcacagagcagatttgtccttgggcggaatcccgtacttcttaattacttgatacaattcataatcacactaatcatcatctctttttcctctggccttgattctgcaatcataattgtcagggccaccagtgtatggtcggcaattaccttttccccatcccgaaacagcgcctgattcctatccataaaatataagaaaatagcagcagcaattcttttatttccatccgaaaaagaatggttctttgtaataaagtataacaaatttgctgccttttcttctaaagatggataaacttcccgacctgcaaaggtctggtaaattgctccaatacttcccttaaaagaatcatccttctcattaccaaaaacatcactggattctccgcagcccatactgttaattaatcttcgacattcttcgtaagagagcaaataaatagtatttccgccttccggtcgcttcatattttggtggtcatatgcgtccaatagctccagggctaagctatatttttcaatcactgataaaatctgttttgcatctaactgttcttctgtccgtttcataatccgcaccacctcttttaattgattcatgcggttatcattgactgcatagccttttactatgtaatcgcgaagaactttatttgcccatttgcggaatgctatgccacgtttggattttactcgatatcctaccgaaataataacatccaaattataatgagcaacctgcctcattacggatctttccccttctttttgaactatcgcaaaaaatgcgacagttgcggtctgatctagcaattcctctttcaaggcgttattaatatgttttccaattgtttttacatctcgctcaaataattcggccatctgatttcggtttaaccatacggtgtcctgttccggcgtaataggtacttctaacgcaacattgccatctgtgaataaaacaatttcctttttatccattgtagcctcctgtcctaattattttcattacttttttgctacaatataataacggttttcgtatgcgatggaacagatttttatatcacctgacaaaagaatttattttacaagtatagttggcttattcaccgtttaatttcacctcacttaccccattttataataaattccataggagatagatacctcttttttgtagtaaatatatctcacctattcacttgaaatgagttccaatttagtcattcatacatactgcaatatgataaactgttgtaaatgctccgccacattcataattacattctatacatcttatataattctcaacttgctcatattcgcatacaaaatgacataagaaacatccacatgagcagcctttaagataatcacaatattttgaccaataatcgccaaacttttcttttgtacaatttatataacatactaaaaaagcatacgggattcccattgaattataattatctaataatttatttaaatgattatttaaatactgttgtccactattagaaaaattattcagatttaaagcctcgtaaattgcaaatggtatttctgatgttttcataatttcaaaatccaattcaccaagttgttttttgccagcagatttacctctaagtgtttgatctgcaatataatatcctttacttctcaaaatatctcttatatatgtatttcgagcattctcttctttcaaaatattcttttgaatcccttgtaatgatatacatgccgtacagatatctctcaaaagtgtatctttttttagactcttttttaaatcagggataacatgatcactaacaattcgctccgctacactttctactgacttttcctgaatttttgtcaacagtggttttattttattatacctttcttttgttgctctcgacattaaatcgacataatattcaagatcccactgtacaatctctccttgttcaattttattaatgctttcatctacaaattggtctataaaatcaatttcaacttctgtatcatcaaatacatcttcccaaaataaaccatcaatgtcttctaaccccgtttctatgaatatacgaggatgattttcatcttcctctatttcatcatctactgcctcgttatcaaactcataaccaaattctttataaattttcctcgccagcgcctcttgcacaggcggaaaataattattacaagtatcctgttctccgcacattttggcatcatcatataatacctgataatgctcaataagatttatcaaaaaatatttataaaatagcctcaaatcttttcgaatatagcttgattttaaaatatcatgaatatcatctaacacccgtaagcattccgacactccactatcttctataaaagtttttggaaagcagatacttaaataattaaactcccaacctgtgtcatttcctaaatccacatacatatcaagtaacgataatatacgctcatttatccatatcaatatttctctgtttaactcctgatttttagtataagcaccctttctatctgttgatatcataaactctacctcctaattatatataatccgcttattatgcgatcatttgtattttacagtctccgcatccatttcatcttaattttgccatacgcaccctgtcattaccatctgaaagatttcttcatttccatttcccaacatctctcttacatattaagcgttcaaggtaggtgaattttcacactccgcctttcctttttccatccttgtcccacatctccacacaatcttccacgctccgttctacgcctgaatcctcccctacaatccccacataccaataaattactaaacaaatatttgctgctataacggttgcaaaacttcatatgcattaattttattatttttttcaactctactttataatcttctattgttttatcaatatataactcacagcacacttcaaattttcgccctgaaccacatatacagttttctccaatcttcaatgtatttcccccctattgcatataataaatttgcttttccttaactattttttaagcctgtttttactccattttctttttcaaaccacaaccttttgtagtctatcctttatttttcttatccaggccacaattccgcatcattattaccgactcgacatgcaccgtaagtcgatgtcaaaaaaccatgtgtgctacacaatattatagcgtaacttattatcttttaaaataagagattttcaagaaatagaaaaaccagaagtactatagcgtaaccaagcgtgttatagaaaaacttgtgcaaggtaggcaaatcgtagtcactgcctaccaaatgaggcgggcccggtattccggaacccgcctgcatcatgattttttcttgttcataatctgttcacatttgtttgatatattccatgtttggaatcatgtgtctatcttttctttaaccccattgtcaaccggcacatgttttctcataaacgaggccggcagaaaactgtcagcctctcctctttttcagaacatgcgcacccgaacatttggtatctgcctccatcactctccgccttccgcctcccctatcctgatggctaaatccaaaacagtagcggctgtctcgtcactgatgaaatgaatatgattcatcataatatcatttataagcaatctcatttcacaaaacatgtcctctgccgccttggcagactgatattgtacataagctccttcaatcataactttatacctccccaccgtttatatatatataaacgcttttttcggtatttttctccatacattttttacttgtgacaaattcagtaagcatgtggctgtgaacaacagttcaattttcaattaacattgaggtgtttttcgttactaataacaaaagacgccattatggcgccttaaaatttttccagttaacaattaaacctgctacttttttgtcacagaaatcacagttccagtgaatgcttctgtttcttccagttttcctgtataaacaacagaaaccgtatctccttctttgacagaagataatccttctggtttttctccttcaaagctaagaacataatccactccatccccatcggtgataacaaacataaaatccttaatgtcactgatagtacctgtaagagtggattcttcttcagccattctattttcaccgcttttagtggaagacacatcaagcgtactttccgctatcgaagtgctaactatctgtgtaggcgctgcggaagatacttcacctttctgcgcggaacatcccgcaaccaacatcaaagttacacaagtagctacaaatacatttcttttcttcattatcaaatcctcctttttataatttcataatattagacgtattgtatttcaaaaaagttgcagattttaaaaattttttttaagttatctttttatttttcctattcatactttgtctatatttagtcgatataatattttcgtagatgtcaccatctatgcccccgaatattttgtacatggatgggtctggtcctatggactagacccatctcctctgttatccccatccttatctggcatcagtgtcaccactcgaacacataccgacgatttaccatgtcgtattcttctgcaatccggagcgctcccctggcatccgtaatcatgcacttgccctcattactgcctattactgggcagagtaaaaatgcctcgccggcggggtccacctggtagccggtcagcatataaccctcgctgtcaaataagtaccatccccatgtcctccgctccatctcctggagccagtaccagccgttagccgcatagttgccgtctgcaaactggtaccaccagcgctgcccgtctgcggccggctgaaagccctgggtgtatgtcactgggaccggggtataatcaatatccctcagtttaagcaccttctgccagggcgtggccgctactctggacttgatagtcccgtagttgatgcccttggcctcaatacaccaaccatcacctatgtacaccccgatatggcccggcttccagagcgcccaaccgaccatggactcgtccagatggtcgatacccacgcgctccacggctgtgtcgtggtagttgtagctgccgcggatgcgcccagtgtaccagctgatgaggccggaacagtccgtgcagcgctggcctatgtacttggctgccttagctttgtaggtggatgtgtatgtgcctgggttctctcgggcgaggcggtccagtatggcctgggtaaggacctcgcccttggcgccgtagacgtaaggggtgcccagcttgtcctggcaatgctgaattaatcctgctgatgtgttactcatagtgttttcctccattcaaaaaaaaaataaggcccagggggcatccctgagccatgaaaagttgtgacgtcacaagttgcgatatcgcaacgtccaattaaccttctatcatctgtttaaacgcctgatgcaggcctgtacttgcaagaccgctaaaggctccggccagaatgatatccgggcttacacttcccgcaatccagatgttaagtgccgctcccaagatggccaccatggtagggatgtatttgttgtccaggtctttcacccacttttttgctatgtaacctgtaatcaagcaaatgcctacaatgaccgccaccgcataattgctaaaaaatgataaatccatattctattcctctctttctttttccaggtcgccaatcctatggttggcaaccttaatctgttcctgtatgaccgcctgagtctcctccagcttgtatgtgcgttcaatcacagtgttgtgcttatccaccttcttttctagctgctcaatccggtaattggtcagcttggcagatgttaccacacctacaaaagctcccgcagcgctcccaagcaggccgatgagcgccaccatgatatccgtgggtatctgcatatcatatacctcacctttcctattcttctaaggcttccaacagctctgccttttcctcttctgtcaggttcttgtaaccttccaagatgtctgccggttcctctccttgacttttccgaatccgcagggcccggataatgatgttgcgctgtatattggatagcattacattgcacctcctatcatgtctgccattgctactgttaactgtgcattatctgcctttaactgctgaatctcttctttgtcagtcggtagtctattgattggtgttgtcccatcggccttgtaaaatacgccgtttatgtacttatctcctatctcacagggatattgcaggcaatcaaccgcaaaggcatcgtcaccatatacgcaccgtgttactcggttgattccttcatattgtcctaccaccacattctgtactgtttcgtcggatatcattgcgaatacttcgtgtgctgccatattaatcctcctactttaatctgattaaaataactcctgagccgccagtgccgccatacatttcatttccgtaggaagcgccaccacctccgccgcctccgccgccagtgttagcaccaccaggattgccccaattcgtttcaccacctccgccgcctccgccgccagcaccaccggggcctggaacactcctactaacacctccgccgcctccgccgccagcatataaagtatttccgccttcgccaaaagctcttgttgtgcgtccctggcctggagcatttgaccagccgccaccatctgatttaccgccttcaccagctcttatgtacggatttgagtcaaggtcattatagccaccagcaccaccagaggaaccgcctgatgcatttgagcctgaactagcacctttgcccccatatccaccgtcagcattacataaaataacaccatttcttgctactgatgttgatcctcctctgccacccgtatacttatatccagcttgtccgctaccgccagcacctactatacaatttaatacttgtccagctgttacaccaatattataagcagtgttagtataaccagagccagcgccacctccgccttgttgataggcttcttttgtaaatcggtatccagttccacctccaccaccgccgccaacacagaatatatcagctgaagtaaatccatctggaattacgtaatcctgcgttccggctatcgtaaccaacgaaggtcctacggtcgtatatacagcatttttaactgacgatgggtcatataccggactgtatatctctccaaagtttgttgtggcatacccaaagcatgtaaaataataagtggtatttaaagctggtaaatccataaatgcttgtgaccagcctccaggagtaacattgtctcctgctcccgcataaattgcatcccaagcaggcgcattccaagctggatatccgcccgtactggcttttattattactccgcaataaggttttccaggagccgcatacggattctgccattttaaaagtactcggcgtccactatatgcggctacgctaaaagacagtatactatttactgtcatggttccggtctgaggttcgtcgctattagctccataaaatatttctccgttcagtacgtgagcggaaatagcggtcaaaccatctgtatctgctcctccactgccgtgtataattgctttcaatctctattcctcctctgctgagcagccccttaaccatacagcaaattccgtggccggtttcttgctgtaggaggttaccgtcaatatgccatctgtattacactctgcatcatcaatcatgttcaggtattttcttcgtatttttattttttctgccttctgcgccaccgtaagttcgctgtcgctctttatcattcccgcatacagctcaatcgcatctgttgtcttaagatgttgcacttttatgtctgctgtgtatggcgcagcggactgcgtgaatgcagggatggtaatttgtttgtcattcctcagggcattcactgccctattcgtagcgttaatgtcattctgtccaaaactgtcgcccttttgtgtataggtagtggcatctgatataccataggtgccatcctcgttctgggtcaacctccatcgtctggaaccctcatatatatcgtccctataatctgtttttaaactcattactcaaatgcacctccattaagtgtgaaagccaggcgtctgattccttcggcccttcctaatatgttcctgtatatcttcaggcaggcggattcaatacggttcagctcttgccagtcaatgaatgggccgttgtcatgataaaactgcctctctcctacattgaaggggaatgtccctacgcagacgtggtctatattggcctcaaagcggttaatttcatcggcataaaacccataatcctgataggtcttatcctctcccatctcctcaaacttaaagtccggccacagagtaagcgcctgggtccgtatctcattgatgttgcccttgatgcggttgtagtcaccgatattaaaataatcactggcctgccagtctgtttttggctgttgccacataactcatgtccctccttgccttgatggtaccgctaagcccaccattaaatttcagggtatggtccgttacccgtatcagtaggtcaggcacatacttattttccaggaatgctatgtcgttggcatcaatccgtggctctccccggtatgacaggtcatattcccggtctgatttcatgtagtccccaatccaatccgccaggttcgcggcatggaccgtgtcggacacaagcggattattccacgcctccaggctgccggtaggatttagctgtctgcttaccttgggctgggtagtaacatattccctgcctgtaacgaccacctctgtcggccctgtgattcctgtaagctccaccgttgcgtaataggcactactatccacaatctcacacccatatttcgggatacttgcaataccagtgaaatagccgatgaacttatcacaccactctatatccggttcattcccgattccccaagctgctgtcaaatctaccaaaagaattgaatctatataaagccttttgtttccataggtataaatccttaggtcccactctcctgttgcctcaaccgtgtcaatggctgatttggtatgccacactccatctggcgcaatagtctctggacgtagattaatattaaatgattctctattggcaatcgccctgaccaaatcgcattcatcatttcccgaatactcaccgggcgattcctcccgcatgaaattcccccgcaagtaatatttatgtccggatatcatctgtacagtttgtactatgtggactgcgtttccatcttccgagacaacgtatgtgcattttctggctgcgtcatactgtgcgttgatccatccggtcacgccggtatcaaaagacccgttctgaaccatattggttgcctccacataaactgggacgtatgtctttaaatcataggatggattagaaaaataaaacgtatatcggttgtctaaagcggttacacttatggtctcccttgccagctcctttgcatcctctgtactgagattgtatatggtgcgtacgacctgcagttccctaaccttggtcagttgcgtgccctttggggtcttggtcaactctacaccatattccaggacataatcagtgctgtcgccgaagattatattgtccagcactacacggttattgggacatcccttggaaaattccagcaccaaccggtcaaactctgggaactcatggctgaccacgtaagtctgtgtcaatccagggactgtataatcttccatagccgcgttattgtagtaggcatggaagataactgtatccggccagttgcgaccaaattccagggttagtccaaaacacttgtatgccgcctccgtagttatttccactgtgggattgtccgtaaacagcccgtcttcctcggcgacggcctcagacacatagcccgtattgagatatgtggctccattggtcgtctgcctgggaaggaaatactgtgcgccggatgtgcctgtgtaatcctgaccaggcagggcatacgcttccttttccgcgtggtcaagtatggctgacgcatgggaaaagtatgtctcgttatcagacgccgcctccatatccggtacaaaactggacttaaggattatcctgccggtccggtcctggtacaggatacatctgccggcattagcaatcagctgcagggcttccttatgcgctaccaccggcatcggattaaccaccagaacgtccttaagatatggatctatccagtagtcccggtaatccacctgggcatccgcaaggacatccacagccatgtcatacaggctcataccgtccggatgataccggccacggtaatatgtgccgtccatcccctcaaaacagtctgatgcctggaagtccatctccgtatcatcagctgaccatgatttcagtgcaagtgacgttcccggtatccactcaatcgttccatcatccatggcctggccgtaaagcgcctcgatactctgaccaatttccaagaagttcactgtactttcttcattctccacatcataggcccggtccttattatccaccgttacggaaaaatctatggttgtcaactcctccgatataggactgatatgttcttttttggttgcggacagtatttttttgctgtcaaaatagatgcctatgcccatcgttatttggttaatgcgcagtctgctctgtccattggccatgacagacggcacaaaacggaggaaggttgcagccggaaatatctcctccgttacataatgcccgctggcattcccggttatttctacggtattgccatctgatatgatactgaaatccaccggatacgccttgccaaattccacggtcagccctttaatgtcgtattgaacgggaaactggatttcaattgccccctgaaggccatccgtcacgattccctggttgagcaccacgtctgctgcatccctgggaaggaagtacatactgccatccaccgtggtataatcctggtcacaggttgcatatagctcctgtaccttgtagttatccatgggctttactaggtcggaataataggtatacacatcccgctcaggtatgtaagcggatgcctgggcctgctggttaatcaggccaatggtgacacgcaggtaagacagtgggttcctccacttcctgcgcatcatgtccttatattcattacttgccgcctgcactactccatcaccccgcagtctatcaggttcaccttacagtctttatacatggtgggcagcccatccggacctatctcatctatcttggccgtccggttccccggatacatccgctctgttttccagcagttgtttttcatgtccggaaacttgaccgtcaccacaaactcctcaaactctttcaggatgctgctccaggtcgccgcatccaggtatgaccactgcaggccgtcaatcttatcctggtcacggcccacgcgctgccctacgaattcccccagggcattcttgccctggttcacgttcgtagcaatggttaggcctggaccccggtcatagtttggatattcatgtccattgatatagattggcacttagtccacctcctttatgtagtccgcatggtgtatccattacgcttatccagttccactaatttcttctttatctcccggatgtcgatattgaccgtcaagtccatctgctctatcaggtcaatgatacgctgtagcaggtctaccatgatggacagatactgctcactcatgccattactgcttgtttgggaagctaaagctaccgcccggtccaccatttcctgcatcttatcctcgggcgctacaatctcgccatagtgcctgttatcacctatcatggccagctgcggggtgttggcgcggacaaaaccgccctgggccagacgcggaagatggatgtttggtatattcgggataaaatcagcgccgatgcctggtaccttatccgccacctcatttacggcgtctatcatggcattaattgcatcaataaccctgttggccatgctttctacaccattgataatcaggttgatgataccctttatatctgcccagataccgtcccaggtttcttttgtctttgttctcaccgtatcccagaccccggcaatagcatctttcatggccgtgaacttctcatccactgctgtcttgattgtatcccacagatttgatacgaattccttaatggattcccatatttctgatgtcttactcttgacattctcccaggccgtgctgatggatgtcttgatagcattgaataatgtattggccagagacttaagccagttccaaagagtattcaaaagtgtcttgattccgttccagatggtactggttgctccagatatagcagtccacgccaggttaacaacattttgaatgaatgttactgcaccagaaacgagctctttcaatgtctcccaaataccggtgaatatttccttgattccttcccacgcaagactccagtcaccagtgaacacaccaacaacgaagtcaattacaccgccaagtgctgtgagcaatccttctatgatacccgaaacggattcccagaaaccaaagaatgtatcaatggcggcttgtaggcatgaagctatgaccggtgccacattggacataaaccattcaatgaatggctgtagagctccggtccataattttgtgaccgcatctgctacttttccaccaaattccaagaatttatcaatcagtgagctgagatactggtctttaaattccacaaaccgcgttgacaaattctgtaataccggaaggatatgggcattatacagattaagccacaaagtaccaatttccgtaaacccttgtctgaaagttgccagcatgggggctacatgctcatcatatgtggtacctatcttttcaaaagtttccgcagctaaatctttgattgtagaaaaaacaggttcaaccgcgctgaatgtatcttccagggttgtcctgatgtaatccgcattttcgatgaagggagctgtaattgtatccaatacatccgccgcaaaagtccctgctagttccgtaccacccatgaaggcttcggaaaatatcccaataatatcgacattaatctgctttgcactgtcactgcgaagggacgaaaaaaccgttgaccacgcttttgctactttaccttctatttcagcaatacgtgagccaatgtcaaacatggcaacgatatattcctttatacggtctttattctgctgtaaaaacaggctgattccacccaacagattatccgcaatggatgcccctatactggcgacagaacctgctatcttgcccagattgatggccaggatattggcaaaccggttggcggcctgctgcacctccggagatgtgaatatctccgtcaggctgtccttgatgccctggatggactctttcatgctgtccaggacgctggtatcaccaaagccgaccttgaaccctgccatgaacaggttcttaagctggttggctttgtcaatcagtccctggtacttgttgtccatctcgtccacagccgaggtatcaagctcgcccatgtcaaattcatctgcggagtacccaccgccagctccgcctccggaaccgcctccactggaatccgtatccgggctgatgatgttgagctcgtcaatgccggtggtgatgctcttcatgtccttggcggccttcttggcagccccaccagccccacctgcagctgctcccgccttatcggctgactgggccatcgcatccataccggccgtggctgcagatgcacctcccccgcccttcttcccagttaccatctccgtgaatgccttgaaggcattggccaggctcatcagcttactgatgatgcggttgattacctggatgaccggtgtcagtacattaatgagtccttgtccgattgtggctttaaggctgtcaaactgcagcttcaggacacgcacctggtttgcccagccatccgccgtccggatgaagtccccggatgccagggacagctggtcctgcacgaacttataccgcagcgccaccttctcagcctcagacatctttgccgtcaccttaccatagccattggccagggcatagctgtcaagggcgctctgggtcatgacaatgccaaggtccttaagagtctctgtttcacccgtgaacacggatttcagctttgtataggcctcgtcctggctaatgttgtagaaggacgccacgtccccagccagaccagtcaaggtcgtggacatctcataggctgcctgttcaccaaaaccgaatgctttagccattgcgccgaaggtgccagtaaacctcttagccatggtctcggacaggccaaaggaggttatggcgttcttggcaaagtcgtccacctgtttggacatacgtgggaacgtgacatccaccacattctggacttccgccaggtcggaccccaattcaatacactgtgcgccgaagtctatgatcttctttactgcaaacgccgccgcgagagcagctcccgcctttttggccagtccctgaataccagccatctgctgcttgaattgattctggttgaccacaaggtcaaggccaatctggcctacgctgtcagccacggtaccacctcctatccacacatggccgcgaacatcttctccaggttggccatttccttctcgaaggttttctcatccatttctttcatttcccggttacgccagtcatcatatatccggcgctggtcctttgtataatgcttgataatgtccttatccgtttcagaccggatggccaccacccgtcccaaggcagtctccggggacaggccggcaatcagcgccttgaactcgtcccaagagactgactcaaattccttcgttcgtatacgcaacccgtactgcgacaggaagctggaaactatcaggtcccagtcctcgaacatgtcgtagtacgggtcactgctctcccgggctgtctacctcatcggtaatcagctgtatggattccataatgactgtaaccaaatccttaaatccgattttcagcttttcaatcttcttcttggactcttcggggaacatcaggttgtaggcctgcagaacttcatccattccgggggcatctgccgacatcagtcccatgaccttaagcatggtcggggcatctgcattgacctccagcacctcacccttaatgacaagggatggatttccctcaaaactcagcttatccgtgatatctacttttctcgccattgtccaaccctccttatactgttaacgattgcgctggagtgaaagttggcttaccataacccgtcacctcaaactccagaccgtcaatatttgtcgtgtcaccacctccgggcgtcgtcacattaacgactacgtcacaggccagctttgctccactgaccatggtccactcaaacttggtcatcacgtcctgtccaaacttccacgccaggccggcaatataatcattccccgggtccccaaccgaccgttttcccttgaagctgaacccaagtttcttaccggtcatggcagccttggcccatccggcagcatccatggaataccactcctcaacggtaccgtctatggatggtgcaaagttctccaaatcggctggcatcaccatctgttcatctgtactctcaaggcccgcagtgccaaacttaaacgcattgttatgcacgggatacacttttccctttgctgcatctgccatctcttatacctcactttctctgatatacaaaatccagccatatcacatattcgtagacacccttatcatccgtccccacgtccactggttccgggacctggaggatgatgcagttgatgggtgtatcccctatggataggctggatacgtttttaagtttctcatataactcataggcggcccgttctgatgcctgcacatccctatcccaatggaccagcagtgatatacgccggacatcatagctgctgtaatcatggccacccagcgccatcacgggagggccgctgccctgccggtgatacacgcctatggaatggtctttcttactgttcagtttcccgatatagacattgctgtcagctacaatcccaaggcctcctatgtatccccggatgtcatccaaggtcagcatcatacaccacctactttcttgtaaaaccgcttaaatgcgttcctggcaaaatcctggcttactccaccaggtagccacggttcgtaccattctccgccggcaaacgggttctcgtccgtctggaagtcatactctggatggtaatagaggcggcgcgcataaggtgtacttactaccagagttgccttcccctgtctggaatggctgtaatccgcaaagaaactgtcctcctctaggcgtccagtatcaaatggcatcacctgcgcctgcaccacctctgtgtgcagggcttccgctgtcatttccagggcagtcactgctgcctgtgtcagctgcttaatccgcgggaagttcatctttacagttgatttaacctgcatcaaaccacctccagttggcaatagttcactgtcccgtccggattcctggccttcatcccctgttcaatcctccgctcttccccaaatatagtaacggtacccccgcttaaggttgggaagtctggggcaatgtccccagggaacatggctgtgccggttatctgcaccagcttcttttctgtggtcagaatggtcttggcccggtcctggaagttacattttaggtccaagtccactaccttctctggatggccgcggttgtctgtatcctctgattccagatggacgtgtatatccgtcctgcatagccgttttggcactaaacatgggtatttcatagcctcacctcgctaaccggcagcacagacccgtctgggacagcagagcgtacacatcgcgcttcatggctacacccttgtctgtaaatacgttccagctgctaccgaactgtgcggatacaccgttgatgctgtagccatgcaggatggtattaatctcgtccgcgttctcatactcaaagtccgcctgctggcagaccacttcctgtatggtttcctgctggaaggccgtcagattagaaaatccccggcctacaatccggttgtaggtcagggaatcaacgtggcggctggcctgcttaagggccctgtccagctcatccatggggattacggtccccttgtatacatcacagtaatattcatatgtgacatagggttcatagggcatattactcacctgcctttttactctccgctttctttgccggttcctgctttgcggcccggagtgaagcaagttcctccctcaacgctacattttcggcatccctttcagccgccaggtcctgaaggcgctcaatctctttcactgccttcatgtgttcatcataaggtattgtctttccgcgtccatatgcggtcacctggccatcatcgcccacaatatcaaagccagcgtcctgataggacttctgctggctttcatcaatggtgtactctttatttcccttaactgctctcatactacctccttacgctccggccgcttccacattcatggcacacccatcaaccttcttttcaagaaggaacaggtctccgtagcaacggttctgatacaaatacccatctgccgtccttgaatctgttcctggggtaaacagcttgatatagctgtatttatcccggcataccacgcaagaggtatgaatcagaatccagttaatctgcttcgcatcagaagcagccacacatcctgtagtgaagtcatacttagtcttcatcctggccgcaggcaccatcttaatggtcacatcatccaggctatgtaccttacgattgattgtggacggggacgttacggtcatgaccctctgaagtccttccgcctccttcacaatcttattcatggttggggtgacatacagcattctcccttcttccgggacaccagcctcatccattctcgccatctcctcatcaaaagcttccaggaagttggctgccgtgatgacatcagtactgatacggccagaataagcggtcagttctgcatgaagtttggaataacgataggaatctttttccgggatagcctgttcggtctcaaaggtgttctgtatgtttgctacggataaggtcaggtttgtttcgtcaatgtccatggggtcaatccagaactcaacatccctgtcgtgttccagtttctttgcctcccagtcattactgagcgttcctgagttaaagcctggtgtccgggtatggtctttgtatccggtcactgccatcctcggaagcttgatggtctgggcgttaatgaatttcacctgctgattgctctgtgtcagtgcatcagagcacaactcctttgcatatttctgctggagcagctgtgtaaaggttgttgcataatcatatactgccatttcttaatcctctctttcattaaagtccgaacgcctttttaagggcgtcatccgttgtctgggtctgttgctgcccgctggctgcgcccacctggatgaatccgctggatcctggtgtctggggtttcagtgccggcacgtcctccagcaccttgttcagggctgccttaagtgcctcatcattgattttcccatcctgtcccatgacctgacctaaatcagccatcttgaggacataagggattgtcttggcgtcaattcccagggatactgcggccatggttgccgcggcctgcatctgtgcctgttgggcgagggcctgggcttgggtggcctgctgctgtaacgcagccacatctggttgcgatgccgccttctgctgcttgaatgcagcaatcgcctgctctacttcttcctggctgagtccctgctgcttgaagtaggctttcagggccgtgtcctccttagctgcgagggttccctccagcatctgctggattttggcataatcaattattggggatgccgcctgctggctggcctgggctccctgctgctgggtctgtgcccctcccactccctcgccgcctgccccgcctgcgggctctgcaaataactgtaagttcattggtaacatgtctctcatcgtcaatacctccattttaagggtgtcaccctgtgattttcgtttcatccattgtcatcagtgtcactggccatgcagcagtttaaagccatgctcgtgtttgggcgtaaaaatagcacccaggataatcctgcgtgcttactcctcaatcttatcagtcaacaaacatccagtcctccgccagcatatctgcctgacttgccagccatcccatctgtacgccgctcgtgccaacaaacgctatggctttatttccgatggcatcatgcgtgcagtttacaatctcgccatctgcatttttatagctgatactggttgccagttcgatatactggtttttcccattccatccctgtcttttaacttttaatccgcgtttcatgtatttaacggcatcgccgaaaccaaaggtggcagttccacccaagatgggtgtgttttccccattggcgacatcccattcatccgacagcacattctgcaatgtatattccactctttgtgtttcgcgaatatcaagccgctgattatcctttgtgtacatgacgacggtttccttcttcgggtcccagcaccaataccctccccaggacgggagtttcattgggataccttttttcatctgattcagtgcgtccaaaaaattcatatgtttccctctctttccgttgcgatatcgcaacaaataaaataccaccggccattaatgactggtggttataatcccggtattgtatcctttattccttttgcaaggtttgctgctttcttcatcaaagtattttcttccagatattcaaggcccttcaacgtaatctcaggccttgtcaacgccaccctggggtatccgcagtcaaaggcattccatgtctgcccacctgtaatatacccttcattcaacagcatggccattatacggctccatttcggtacagacagttcgagtctttcagcagataggatttccctatctatttcctcgcagtccattgatttctgaaggatgcggagtatcttataaatcaaccggaaatcatccatacataccctcctttatggttactgggatttttcatgctcctcgacaattttccttaactgctctttccattcctccagggtgtattttccaccaaggcagaaagaaatatccttaagctgtccggtaattgcgtataccttccgtcttaatgcctgaagttcctcatcgttccgcatccggttcttgaattcttccttcatcattgctttattcacctacaactttcaaaaatgcaagatataattcacccaactcctctttgaggaatttaaccgttacatcatccccttggtaaagggcagtgaacacgtttgcaaacacttccaactctgaataccctgggataccaatatattgtgattcatgataggcatcgcccactatcacattatctgtcaggcaccccagtatatcgctgatgaggttattatactccagttctcctccaggagcaaataatttattatatctatccgcatctttcagcaaccttttctctgattctaaaatagcatccgtaaactgtacattcattgggcttccaaactcgttgtggtcaatccggtgcgccaattcatgtatcatgacctctctatagtcataatattcatacaacggatgggctgggttaactacaattgtgtctgtatccgggtcatacgcatacgcatgttcagccgtctccttaagcacaacaaattcatcctccgtgtatttatcgactaaatctatcattttctcaggtgtatcatcccgatacacctttatctcatctgaaaccgtgtatctctcccctgcctccccctcccatttctcggatttctgtttatactgcttctgattttctggtgacaaagaatattccgccagccgcccatatttctctacctgccttgaagcatacttccgttcagcctcctgctgattggcctggccgatgtcttccagttccttttcactccagatatcgtccgccgtggaaatgccggggaagtacgttgtgtggctgtccttgcatctgggatgatacaggccggccgcaacggccttgctcatgaggggatacggaccatcggatttctttccgccggaccagacgtcgtcaatcaggaccttaccgacaaatggcaggcacttcggacacgggttcccgcgcttgctgacaatcacggtagtaatcccccattcttgacgcttctctccttctccttgcagatacgcccgcttggatgccgtccggatggccatgtcggcataatctgccagggtatgacgggcaccattggcatactctacacagttaaggccccgtgagagcatgtccctggtagccatgtccactgccttctcgtaggttcctgcaccggtattggcataaacctgggcattgaagattgccttacgataatcatcattagctttacgcaggacagccgtctccgccgcttccatgtcgtgggtagtggcctcgatcaatgcttccagcttccgttcattcagtttaaaaaactcggcggtggcacctttgctgattttcctggctggaaatcctttgcgaatggcgttcagtatctggatttcctgctgcatgttacctttttgcctggatatccgtatcagctcacctatttccttgttgagattctgaaactgctttccataccgttttcggttatccctcttatacttttccagggccttaagctgctctgcctgccacatggaccactcaataccctctttggtttcctcggcccgatgtcggtccatattgcgtatcatagacttgataagttcatcctctatggctttgaaggcggcgccgatatcgtactcattatgttgcactcatcagcgccccttccgctccaggcgtgcctccttctgacaaatacactcccttatttgcatacacattgaatccctgcgccttgaattgccgtgtcaacgccttgagctgggtcacgctgctgcatttatcgcaacgcagttccgcgtacccctgcttctcaattgcgtagatacccagtggtacctgttcctttgccacctgcagcagtccctggtactccttctggctcatctgatacagacggttcattaccttgaccttcatctggctttcctcccttcatgttaagttgaaaactgccagcagccgtattgattccgggttcttccactttcgcaatgccctgctctgccttcaatcgcgctatctcctcttgtttccatgcatcgtccttgctatcaccatacaattcctccacctgagcctcgatgctcatcattggaacgccgggacgggccttggccagggtctccacctggctctcaaaggatgggtttgcatactcaccgaaggggatatccactttgacctcctccacccccttaccatgaaggatattgcaagcgttgattgccgcgctgaccagctccggaagagtctcctgcagagcctccacaatagcattccgggtgtacagggtagctttttccttttcgcgctgcgcttcggcgttgtccagcttcttgacatcaatccccagagtggatgggctgataacgccctgcaggcacaggtccaaagctgtacaataggacgccagataactatcgtgggggatagttggctgcaccacattgaccttgttatctgcattctctgacatatcattatcagaagcaaaatatcggtcgtcaaatgggttcggccggatgaccttccctgtctccgggtcgtgtggcaccaggcagtccggtatgtacgtcttggcccgaccagcacgcagcgcatccatccactgggaccaggcctcgtcaaaggcatcaaaactgtccagcttaccgtcaaagatgctgccaccgcgtccctcgtatttggtggattcatagacttgcaagggtacggccagcatgactgtatcatcaaacttcgtatcttttattccctttgtggcatcgatggcattaaggggcaccgacgtgtcacccttatacaactcgttacgtatatagccgtatccataatgctcatacaggacatactgctgatacccggatttgtagggggtcttgaaaacaacttccttcacccggtcccggtttcggacaatctcaacccgctcccctggataccactccaggattggatactcactgacggtcgtgtcaaccgtgaccttgaaggcgccgtccccgatgtacaggacctccttcaaggccttctccagcttacgagtgaacttattatcctttgcaatgtcctcccacagctgccgctgctggtcgttacctgcaaaatcaaaatcattcatgtcatccaggacaatgcctgacaggatacggataatcagcccgggcaggccggtatgtatcttgcgcatctccatacccggtgtacacctgctggcccagaacttgtatctgtcagcgtactctggagcctgctgatacatctgctccagctcgttaccatcaccacggtaccagatgcgatttcggatggcattggtctcgaagtccaggacctcgttaatctggatgcagttcccgctggccggtaccacattcagccagctgcggatgccccgcttgatagtctcactcatgttgttcagccacctcatttcttctcagcctcctcgaatccaatcaggttccggtatggtatccaggcatactgattggcattaatggtatggtcgttcctgtcctccggcttgtccttctcgtcatcccaggagtaccggtccaactcggacagatgctccgcacaggtatctactactaggtaacacccctgctgtatccagcccagctgcaggttgatacggtcgatgattcccagctgcttgtacgcatcccagaagttatacagacagcccttaagccgcttgtatttgcgtagctccgtgatggtcgcctggtccgcattgtctatatacacatccttggcaaacccccagtccttgcggcactgctccagaaaggccacgaacttgactgctgtgtcactgggggccagtgggacatccagtttggcgttgttgtagaccttctcagccagggtaacaagctttctgtcctctgtgatgccctggaatatcatagctatggtatctggggacttagaggagtaggatgtgtccagggcggcagtgaactttttgaatttcagtgccttggcctgcttgactgtgatgacatgcttagaccgctcgaagttgctgaagatcaggccggttgccttgcctctcaagccctggatcttgtttttccagatctttgtgcccttcggcgtgttggtcatgatctggtccaacttctccttggacaggcccagattatgggcaaaagaaaagaaccaatgcacccaaccgggttttggttcctcctgtaattcatccattatctcttttggtgtttcatcttcccactcaggcagtggcctggaacagttgatatactccttatacacatccaggcccgggtcatccgggttgagcgtggccatcaggtaatcgcttctcatggcggcctcacgcacaaactctatgtcggccgtgttaatctcatcaatgtacaggcatccgtactggccgcccagggcatccttccacttgcgcttgttgccgtagccgacaacaaagattatcttatcgccgccggatgtgtggaataggatgtgaggcatgttatatccaccgccgccgttgcctttgtactccaccagcacgccgaagtcatccaggatgcccaggtccttctggatgatgttcttctcggcggcgccggtgtcatccgcagccaggatgtgcagctttttgggcgattccgctacctttagcatgaatttgaataaccccaccgtggtcttgccggccgccgtggtaccctccaggaactccaccggggcatcacagcgcaggaacgccttgtacttatccgacagcagtaatctacccgcgctcattacccaccaccacgcatctgctggagcaggtcgtcaagcttggtcttttcggtatccaagccgccggacagctccaccttatccttaaacatccccagatggcgccccaggagctccagggctcttaccctgtcataggtttccacgtttatcccaaacttagtttctttgattgcggagatagccgcccgcttctcctctggcagttcttcagtcgggattattcgaaccacatcccttgtctgcatctgaccggtatctggatccaccacataagagttgttccggataaccggctcccgcacaacatgtgcaaaatcggtgccgtttgcactggcaatcttccgcagctcctccagcacccaatcttgggtaatctcagtacgcttttcccggtccttcatgcgctcctggatatattccgcaaccttagtatttcttagcagcttactaccgttgaccgccgcagcctcatccttcttgcagctcggatacgcaaccttgtaagccctggtggcattcaggccaatcaagtattcctcacaaaatcgcttctgtttcttcgtcaatcaggctcaccttctttctgcgcaggaaaaagcctccacatctcggcggaggcccttaaggggaaaatcaatgtcaaatgtatctgtccgaatagcgggggcaggatttgaacctgcgacctccgggttatgggcccggcgagctgccagactgctctaccccgcatcaataccggctcgtcaccggtatgttccaactcacaccgcggttggcttacggataccttgcaccagtatggtatcaactgggagctgctctctatccgatttgcgaagctatgaagagacaggagaacgtcagcttctaattagccaccagggtatggcacctggcggccgttaatcaatgtgggaggaggaaacggctcttacaccacttccagcctatactataacattttgaaaacgaacagtgcgaacaaaacgaacaaacattacttttcttccataaatcgctgaaattccattctcacgctgtccgctgtggcctttcttcccaatttaatcgcaacttcactccaggacatcttctgaaatatcgcatatctaataatccgctgcatcctctgaggtattgcattcatccaagtctccacccgaaccttgattctttccgcatccgcttttcgctcctctaacagatgctcataggtctccagtgctcctggctcgctcacaaccgaataggccatcccctgaatcttaaagctctgggccgtataagggaactctttcatggacccatgaactctgtcctgtaaaatagtcttacgctgccgcttaaccctccgtatatcttcctcagtttcctttatcagctcgcaggcgtctatgtattggctcaaaatatccttgtccatcggcatatccttgtccatcggaatcacctccccgtcagtattcccaccagagtacagtaaaagataactgcacagacatctttctttcgacaatagtaccatgccatcagaagattccccaacaatacagtggttctaattatttcaaatattattggctccacctccaaactctcttttataccacatccgcagccttgccagctgtaccctcacgggcggctcccgcagctccggaaccgggcacaggctggtgtacatgtaggccggcgccgtccgtatgcgctccttgatggcctcgtcggcctgagcggccagggccttgctgcggtcgatgcggctgaccttggactgcttactgcttttctttctcatagacaccactgcctcattacgtgtgttaccacctttaggagctgtactgcaagattcagtcctatataaaatcctgctcctacgatgatgccaaagctgtaccattcaagtacctttttaatacactccttgcacatctcctgattctcctttcgtatcaaagtttcagtttggttcatcatgatatttcaatgcctggccgcaagttgaacagaaataatcatcatcctcaaccacatctgaatcacataccggacagaggcactctgcttcatcaccagctgaataatatgattgatatgctggtgtccacaccaccattctcggctcacttttgtcttttaaatactggacttctcctggctccaggccggtatcctcataggctttcaatctctcaattaattcgcggtatggattacctttcatgataattgcgggcaatccagtatcacttgtggaataagccaacagtctgccttggtcatcaaccttcgttaatcgttccatgctgttctccttccgaaaatttcagttttgctaactaaatggtttcggtaaagacatccaagccaacacatcctcgtcataacgtaatggcgttccccatctatacccataccatgtgccaatggtcacatccctatcccacagggtaatcaacacagtatcccctatttccggcaaccgctctgctactggtatccaaccacagcaatcaccgccgccttctttaatcgcctccattgctgaattcataccagccataaacatatgcaattcagcattgcttaattttgacttttttaatatttctcttttcttctcatctactttttcaatgaatctactgacattcatatatgcaattccctcctccggttctcccggaaatcctaattttactcactgtcttcacatgtgcctaaatcgtccagataaataatatctttcccgcactctccgttatctcctcggtaaacacaatcatcattactgcaaacaactattgtttttcccatactatcatccttcctccggcctcccggaaatcttaattctgattacagcagtcatcccccgactcctccacaaggtctctatccatctgccttattacctcgggccactcacacagcccggtgtcctctatctccactggtctccagctacaggtattgcagtccttaccatcatcccccgactgtgccatccttcggcactcctggtagtccttctccatctcgtccgacacatccaggcgcagctccgtatgcggcgccgggaataatttaatctttctcacggttctcctccttcatctcctttataactctgcacactgtcccttcatgcagtcccatatcatccgcaatccaccggttgctccggcctgcttcatgcaacgccatcaccttgcccttgtctaccctcttggcccgtttgggatgaccgtccactgcggacctatcttccacgcaggaatccctggatccgcttttatttttgtcaatagggaggggcatcatctgctcaagcctggaattatccattgctggttcattccggaagaacagacagccgcccagcaggttttgcagtgtatccggtgaatagtcctcccaccgcttcggttccggggtgttcggtgccataatgttaatctcctgccctacggcagccagccgcagggcctctatcatatcaatctgtttcacgaacataatccttaatctcctccagtctgctgactgagacttcatacgcaatccgtttctcacactcggtctcactcagttgcttcacatattccctactctgtacccggccccatgtcctgaccctggcccccacctcaagaccggatacataccgggcattccggccccagctgatgcaaggtatgtaatcagacttgccatacggccggttgacggccagaaggatgtccgcaatctcacgtcccaggggagtcctgcgataaaccggcggcttacagatgtagccatccaggaatatctgatttgtctttgtataatctgtaaattcctccatgaaacggacctcccggacaaaaacggacagctccaggcggttcctgatgccctcatggcggttgtaggaacggaactggccaatggcctccatcgtatcaccggaataatcccggtgtacatccagcagacgctctgacaccattaacggcaggatatccgcctggccactgagccgcttcacagcaatatccaccagataaaagccttctccaaaagcctcatgactaaaggtaaattccgatacaatctcaccaattacacttaccttgttgttttcaatcattttttctgacatagtacatcctatcctttcttcaccttctgaatctctttcagtttctcaatcaataatccccggtttgcctcacaatcccggaagaacttcccatcccgcagcagatagtactcatgccggccgtaaccatcatgatatttggcctcatagcttcctgacgcatatccatcgaatatccttgcgtgatacaccttgaccaccatgctggtgccgtcctccaggtcataccggtagtagcgctccccggtctgtttcgtctcaatccataacggccacgtcacatatgcatccacaaaggcagcccgttggtcattgttctttagcaccggcagttccggctgctctggcttcggcggcggattcacgatgtcatccaaatcgcacacatagctggccagggcacaaacctttagtttcaaccggcggatatgtatgtcattttcatccacatcacattttagcccatcattaagcagctttttggcacgctccagttcatcctgggcaatctgcagctcggtcatgggttcctccggggcccggatgtcatcctccgtttctgaaatctccgtgaattcaccatcaatcacggtatcctgggattccggcatgccaggaacatcgtcttcatgttctgatgcctcatcctcagcgcttcccaagaggctgagtaattcctttacgtacttgctccaggtcaagctcagaaatgtctcgcacatattatcctggaaatgaatccgttccgggccgcattgataaaagccgtactccgttgacccgctgtcatggggttctccgtaattgattatcagctcctgcctcagcagtttcacgttcccgtcattgacggcctgcgcacacggcttggacatgtgatgctgatagaagtccagaacacattcctcctgggaagggatggctgttttcccctgttgcacatctgcggcttccagtagcggacaatccggctctgcctttggggtttccagatgctccgggcgccgctgcgaactataacattccaactcacagtcaccgcgcctgacgcattcccagcagcacacccggctgcagtcctccccggttcccgggatgagcttatgggcctcctccagggtgcagtcaaattccggccggtggatgcacttcccggacttctctggatgagcctgttctgactttggtagttccggctcaggctccggttcttcatcctgggggcccggctccggttcaacttgtggcgtcacaagttccggctccgtctttactctgtgtcggaattggtattcttcctccagacgggtattttctacgtcgaatacggtccgtcccgaatccgtgtaaaaaactgtaacgtcctgccgtttaagaactttgtatgatagtccaaaagcagtaacttcacactctttttcgggcctggcatatccggcatccaggtatgctcctacaaccacggcaagggcggcaccatacgcattgtctatcgtcctgtttccagcagtgaaatgtattacctccggctctctttcagctccttcatccagttgcgatgttacaactttcccgctcagctctccctcatgttccttcagctctggttgtaatgtcacaacttctttttccagctgaggttccggcttccggatagcctgcagctgcttcactgtcatatccggattaaccagggtccgctgttcttccgtcaggtaagccagctccaccagctgggaaattttatactccctatactcttccgccagcaccgggctgttcccgtccttactcaactgatcattgaccttgatgcaccggctggcccatcccttatcccggtcatatttgtcacggacgaattcctcaaaattctgatatccagcctcctggaagagttttctgtctcggatggccttaagataaaacccaaccaaccgctatgtaattcctgactgaggcccacatattggtttctataccatccatggcctgtgccagggtcatgtcacgttcataccactgcattacttcattcatcgcggccctcctacttcatcgtctcatatatccacttcttctcattccacgcaacagccaccggcgccccgcagtcatagcagtccatgtcaaattcagtctctgtcatgttggtcagatacctggcctgcctgccgcattcacatttcatgtacagcggaaccatacgctccatccttgtcacggccccgcattcacaccggtaatgattcagccgtgtcttggcacagaatcccctggtctttccacaggcagggcatttcatgtacagatacccgccataccctgcggagatgatgttaggcgccggttctccgccttccttttccggaatctctgctgcttccaccaccgtctcagcctcctgtctttcctgacctggatagactgtttctgtcgattcctgaaccggtgccacagccacgccttcctgcagcttctgtcccctgcttccaatcagccacagtgattctgccaatttgtggaacgccgtccgcgcctggccctcctccatgtccatcaccatatatgctcctggcattgatatcctaactttcatcctgttctctccttcccaccggcatgcatccgaaatgaatgtggagctccgtccgccgcctagtcttgatatacacatgatccccgcttatctcctgtccgcactggctgcagatatagaccttggatttttcagtttttctttctttcactttagccatcagaccgtctcctcttctgccgcatccataacaagttttcttaattccatgacactaactatgacactgccatagcactttttctgatacacagcctggctgattgattcacacaacccagaatctgcaactgcctggttgattctctgcaggctcttctcttcatccgaccgttttatgtacagattcctgtgtactacttcatgaatgactgcttctgtcattttcttgagttcctgccgcaggctgttgtatgctgttctgtgttttgtccggaggatttccagcggcacattatcctcattcttctttagtttccacagtaaatccttatacctctggatatcaatgctgttgatttctggtatttcatcttccacaaaggcatcccagaacataatccattccaggtcagcaaacctatccacatcctgctttgtcttgaaatgcggataatggccaggaacacgtctaacaccaatttcccatatcttcctttcggcatattctcttacttcgtccgtcatgatttcctccaagtaaccacttttcatggttacagtaaccatctttttatactcattggataccgctcaaaccctcataaaataaggctttgtcagccacggtaaccaaagtaaccatgtttttaggttcccttacgcgcgaggcattttttctaaatctttgttaaaatatatacaaagattgtaaaatattttttctgtatatagatagggtttttggatggttccatggttactcacccctaaaaacacccgcaaacccgcatgaaacctagctttttgcggtaaccatgccttggttactccatggtccctgtcagttgaacggcagccgttcctggccgtcatcctctattttcacaaatccatccctgtccgtgttgtcatttaacttgagaaaaatgcaccgtatcttattcccattgaagcttttcaccttgtccatccgtttcccgctcccttccacctggataatgcccttccggttcgcccaggacaggaaagatgtacgcgaaaacccgccttccttgcacaaagccgtaaaggccgtggcatagatgatggcatatccattctcaatcgtgccccacttttccacgttctccactttaccgtcaaatctggccggattcatagccaccttgtccagcacgtactggtagcacctctcattgtcggacagctcatcacggtccaccaggacctctctggcctcctccagacttatgtactgcccgtccttgaacagatagtccgtggccagcttgtcggccgtcaggatgattgacagggacaggctctgcttctgcatcttctcatcatctgccagctggcgcaggaagccccgctgtatttcgcggatctgctcaaccccaatgtctttgacgacatccacaaactcctggccggcatggccataattgtgtttgaccagctccgcagtggccccaggatcgtcaaaaacccgctgaccgcactcaatttccagtattcggttgatagcgccaccctgggtcacataggagctcaaaggccgttctccattggtcagaatacagttcttccagtggttctcccggttcagtcccagctccttgttggagcgggttttgccctttccggagcacaggtcatagaccagcccctcaaagttgtcctctatcttccggttcttcttgctggtatcatccagaatgaggggcaggttattcagcaggtcgcagattgcttccagcccgacctctgtccccttataatccttaatataggcgctctcgtccggatccgcccagacagacgcagccagcatcagatccactgtctttccaccttccgtttctccccagaggtccacaaagtacggcagaccgcccaggagctgcaccaggacacttgaaaaggatgccgccagcataaacttaacctccagccggccaatccggcgcagctccagcacatgctcataccacttattacggcttccggatggcccaatgctctccgctatctggcggaaccgcacgtccccatcgaacacaatgtccgtgtcatagggcaggaacccaccgcggatccatcccagcttggacgtggaatactgaaccgctatatgctcctcgttggcgttctctacatcagccaggtaacgcaccaggtattttgcattctcgctggtgaccgctatcccacgaccagacaggcttactatcttattggcggacgtaaccatggttttaggcacaatgatttcgtcccaacgcccgttgcgtttgtaggccagctttatctgctcctccccagtctccaggttcttcagccgctcaatgggcaggataggatgatagcaggccaggatgtccgtgtatcccgtggtggggttccgaaggaatatccctccctcgccggcaatccactctttacactgcatccggtcatagggtccatcaaaattggtccattgctccagcgtgcagggctggtttttcttatcacgttcccggcgccgcatctcccgctccacacgtttatatgccttgaccagttcctggaacttctttttcacccccagctctccggcccggtcctccagtgacagcagcagccttgacttgtacagctcgtcctcctggtcaaacacttctgtcagcacatcatccgacaatactgtttcagccgtcagctccttcaacggcaccatgctaccacctcgcttccaatccgcttaactctgcctgcacatacagctggtactgcagggcattgtaacagtcacaccaggtatcgcttagcggctctgaatgctccatataggccctgtagatgcttatgagaatgttgttcagcctgcacttctccctgccccgctctgcctccttttgacgcataatgcgctgcttccgtgcctggtagaccgccagccgacttgaaaatgtcggctccttatattctcctccaagtcggtggaatgcctctttgaaggagacatcatctatcatcataacgaagtcaaagatatcaccatgcttgccgcaggaatggcagtggaagtcccgatcatataccttgagtgatggcgttctatcgccttggtggaacgggcagctaataaacccagcccggttgggctggaacccataccgctccaccacatccctcatgctgtatgttgccttaatttcctcactggtcatggcaatcaccgcccagcagctctatgatccgtttcccagtgtccttcttctcgcagaacaggaaccggcagccatacttgcgttcaaatgtgcatagaattttataaagcttatccccggttgtagccttcgtctcccgctccatccatctgcctgtatgcggatccttatatcgttctacccgtctgggattcctccaccatatcacatcctccaggcattcaatcccccggccgtgttcacacagaatgatgatttcaattccatgttccctggcccgcagaatttcatcgcggaaccggttatgcccctggcagacgttcccgcacagctccgtcaggtcctgtttccggtctataatcaaacgggggttatcatagttcatataatccccgacatataactttgatacgaaatggtccacaccctggcggtcaaactccgccacaatcttccggatggcccgggccttctcgcggctgtcaatctgtatattcaagcaatcacctctgtctaattaaacggcagtccttcgtcctccactccatcaggaatgttcataaacccatcaccaatcgcaccgacaggggcctgtctctgagacggagctgcctgcgtatagccgcttcctgtatcagatgatacgttcctgctgtctgcgaattcctggtcatccagaatgacatccgcggtatatactttatggccctctttattcacatagctgcctgtctgaagccttccggaaacaaggacacgcattccctgacggaaatacttctccgcaaactccccggcccggtcaaatgcaacgcagttaataaaatctgccgcctgatcgttgtcctggttcctgcgtcctctccggtccactgccagcgtatacttcgcaatcgtcatggagcgctcgccctgcgaatatctgatttccgggtcccgggtcagccttcccataagaatcactctattcatttttcgattcctccgactcctttttcttgtatagttccagttttcccatacagtccttgtactggaccacgttcatttccgctatatccttaatgctgtacattttaaggatcttctccatttttaatcccttggcactgtatttctccaccagggacttcacagactcaatcatggccggggttactttatccaccccttcgttctggtcaggctgtgatgtggatgttccattctttgcccctgccggcttctcattttcctgttttccggatgtctttgcgctgccctttgcgcccttggtggacgtctgcccttttccggttgtattatcctggttgtccgcatccttcacatcatcaatgcagaacaggccattcagggcatatttcctggcatagctgctggtgctccctgtcacctgtgacacatccattcccttcttttcctgttcctccctcgcataggccgtgttctccacggcctcgccggattcacagtccacaaaccgggccgtggccctgatgtaataccggtccccaatcataaccagctcatctccgaccaccagcgccgcctttacctcctgaaggaggggcttggccgcctcctggatatcctcacagttccggtaatagtagtttccgaacttgttatactggctcttcggggccttcagaccggactggacatgctgcagtttctcatatacattcatggtctacacctcctctatccggataatggtgtcgttcgatgcatatttaattaaactcgaagtcagttctttggctgtaagcgctccccctgcctccttcaggagtttctccagcaaatctgctgattcggaatcaatcttgacgactccatcccctctcgcattccggttaattctgacttcgctttttctacttacagtaataatattcgccatcagacatccttcctttcgtagtacagccccagactgatcatggccatctccagctcctgcagttcggaatccgtccccaccaccgtatatactgcggtatgggaatccggtgccgtcaacggtgcggcgctctcctcatccacggaccttatctcatcctttacggctttttccgcttctttgcggatacgctcttcttcctcttttacggcttctctacggatacgttcctcctcggccacacgccggcgttcttctgcccgtatccgttcaatctctgcctggtgtctgcgttcctcctcctgcctgcggcgctcctcttccttacgcaatgtctctgccttctgggtctcataccggttgatgtatgccagcgcatccggaaggctcagcgtagcctggaatttccgcagggcatccggtaccgcatcggactgcatggcctcaatggccgccttgcctgccctggcgccggctatggcctctgatattgcctttcggatagacttgacagagacgctggcattgctccacttgtcctcctgcagacggtagagcgggagaaagtccgccatatcgccgatctcttccatgtagatcttctctatctctgcctggcgttccttgatccgcttatcctcaaacacctcaatctgtccattgatatggttgatcggcttgtccaccaaggcggtcatctgcttcactcgggcgtggaactgattatatggttccatccactgtgccttgacctctttatcgctatcttctatagacttcttaagcttacgcagacctgccaccgtttttttggcgcctgccttagtatcctctgtgaaaaccacattgtcatactggctcatttcaattacaagctgtttttcaatctcgttaaagtttgtctgaatctggccggctaccggctttacctgtaatacaatttctcccatcatatcctcctatttgtttgttgattctatgtttcctgcgcaccgcggcgcctttctgacactgactgcaagccgggccatccggaatccggtactggccgcacacatcacatttatgaatgtcacgcatcctgcagcacctccacctgttcgtccggccggaaactcacatccgaccggatggaaccaaggtgaaacatcaccacagccatacgctggaaatggtgtatttcatctattgtgaggtccacccagttgccataatcaccatactctatatgtatcctctgtccttgctgcagctcactggctttaaccttcattcctccaggaacacctccgcttctatcagtgccgtctcctccagcacccagtcatacatctccttcttctctgtactggctgcctcgcctgcccggcgggccatccgctcccggaagagcagccagagatgatggtacttatcttccatgcttactctccttcccggccataatctcatcaatatgttccagcatgtatgtgttcgccccatcccggaaggcttccatgaatttccccatggccttacaaacccccttcggctgctcaccatgcagtttgattaacatatccttgacggaccgggccagtatagtcacagcgtcccggcggctcatcctgtcagcaagagaaatgttctgtatgcagtattccgtaccaatcagcgattcctccgtttgtttcgccgcaataacaaacaccgcattgctttcactaatccggatttcctccaggctcccttcaaaatcatgactgattattccttttatcatcttgcaatctccttttaaatcccttatactaagggtgtgctaaactatttgtccatgggcctcttgcggttgccgccgctggggtccatcttaatttcttccaatatctcattacttgctgccttggcccccgcctcaatcctatctgcgttaccggtcataacgacaccggactggaccatggcctgtatgatgatgcctttaataacttgtctctgtattatcctcatctcctctcacagtctcacgcccatggccagcgccatgaccacaatagccaccatccacatccccagcagccagatgaccgccggcacaatccatttagctgccctcatgattggaccgtcccggcgtctcctgcgccgtcggaaggtcaccatacgtctatgccccatgatgttggtcatcaccgcggtggccggtcccacaaaatccacacggcagccgggatactggaccgctgctttggcgcggatggctaactcagttacttttgtcattgcgctcttcctccttcctctatttcggctaccggatacgtcataataaatcgttccaggtcactccctcgtatcttccgctggcccaggagcaaagacgggagcttctttgtactgataagctcatacaccttggttggattaaccctgagaacgcctgccgcctccttgactgtgtagattggcttgtaaggttccaccatcgcttttatcctccttcctctcatagtccctgcacggataccaccgtgtccgttccaggcactggctatgccggcaggtcttgcatgttgttttgatatgtaccgcctccctcgttgcgttttctccccctccttggtatactgtacttacaggctcctgccagagccgagtacgaaagaaaggagattatgatggatattttaggtaacaaacatataatcgatatggtaaaagaaatcactgttgcaaagatgtctaatactaatacccctccatcaaaagaaggtggcgaaaaagtagcagagtttatgcaagcgatttatgacaagctcgttgaattaaacaacaaggcactttaaatcttccataattcgattagttcatgagccagtgctggtaaaatctctacatctttttcagatactggctcattgactgtcttttcaatgaaattaagtattgcggtttctaatcgttccatttctgtcctctcttccacctctctcacctccttttcccagttgacacacatacgtaatagtggtatattcttcttatcgaacgtatgtttgttttttgtaattgagcaagaactcaaaggatacttcaagggatttgcaaattgttgctacttcatccgcatatatgcgccttcctccacttaaaattctggaaaaagtatctcttcttatgcctgatttatctgctaccgaagtgcttttaataagcttatctttcatgtataaattcaggccatctctaaattctttttcgtagatttgcacatcctgcaattttttcacctccttctaaacaacattttgttgtgtaagccaatattactacacgttttgttgtttgtcaagcatcaactcaacattttgttgtttttattattgacgtttcaacatcaatgttgtataatttatcaatataaggaggttctaagatgtctaaggaagagattgcttcaaagttaagaacagcacgagaaaaggcaggatataagcaagaagatatagccaatattttgggcgttacaccgcaaaaagtcagtagctttgagactggcagaacgcgcgtggacgttgatactttggtgacattatgtaagctatacaatgtggacgccaatgatattatgggcatagctccaccagaaaaaaatcctcttgataggcttatcactgtgtatactcgtagtaggaagaacctctctcaagaagaaaaaatgagacttgctcgtatcatattatcagatgatgacgaggagtaatatcaaatggattatcaaagcctatatgacagtattttatacgcatatacgttttttggcattgactcatttccagtagactgcttcgaattagtgcggaaatgtggtttcagaactgtgaaatatacggacttaagtgataagaagagaatagcctgtcgaacccttagcgaagatgcctgccttttggatggaacattgttttatgaggctaaagcccattcgcgacggatacaatttacaatagcacatgaatttgggcatgtgttcttgaaaacagacaatgaggacaaagctgatgaatttgccagccattttttagcaccacgtattcttattcacaaatataaatgtcatgacgcaatccagatacatgatacttttggtctgtcctatcaggcatctaacagagccttgatgtcctataaggaatggttccgcaatatttcctacagcgcaacgaggaagcccacggagccagagttggagctggagcaaatattcttcccggagcaggaagaagcaccggccattatggttgagaagcagatgaaatctgtcaagagccgccgtagacagcgactacgcagggaattggatgagcgttcttcctttatggaatacttgcgtaatcaacgtgaaaactatgattttgagctggcagaacgccagtatctatatggaaatgacttataattaaaatagcccatagcttttttaatagaacgacatagaaaatctaaggaggaagttgtatggggatattgaatttttttaaaaaagattcttttaatatggatacattggaaggaattgagaaaataaaaatttcaaagtatccaccaataaagggactggaatctccaattaagaacattgagtatattttacaaagaaaagcgacagaacataagaaaaatggtcgaatggatttagccatagcttgcctgaaaaaatccaacgaacttatgccgcattctaatttccagtatcaggccagtgattatatgagatacataaagtatctccgacaaaatggacaagaagacattgctgattccgaagaaaatcgattacatcaagagcatccagaacttttcgacaagcgaatcggaaaccgtaaacgtattatagaaagtattgaaaaatgtaaacaatatcatactgacttgatttatataaaaacaaacggcaaatgcccactctgcaaaaaatacaataataaaattttttccataagtggaaagtcaaaaaaatatccgcaattaccaaaagaatttttgaccgaaggcggatttgataaagattgtttcgttggtgtatcaataaagttatagggaggtatcaatatgaaaaaaaataaagtactattattaagtgtgtgtatctctgcttctatgggtattaccgctcttgctggtcaatggacacaggatgcttccggttggtattaccaaaacgatgatggaagccatccaactaaccaatggttccaggactttgatggaacgtggtattacctgaatgaatccggttatatgctcacaaacggcgctgctcctgacggcagaaccgtgggggatgacggagcatgggtacagcctgttaccggagagacaaagaccgtgttacgtgaaataaacaattgggttattggtgatgtctggaatcacggatattgcgacttctatcattatgaatatgacggtaaggacagcactggacagtcaattgatattgattatgcgcttcaattgttcaaggattcctacaagaaaaaagcagggtataatgcctacatcaattccctttcggatgattatgccgccttaaaaaccgcttggggtaagttaagtggtgaatctgacaaattatataagcattttgaatctggtgtacagcagactgggaatgataccgatacggcaatcttcgttcagtatagagacgcattttccaagagcgtttctgagaaaaaataaattataagcaaaaagcccctgtgctggtaacacaagagcttttcacataattctcttaccggactgctccggaagatataataccttaaacaagtaaattatatcattcctggagcgtcctggcaaggggcgtattttttatacccaaaaagttgcgatgtcgcaacaatacaaggaggaatgatatatgggacagttaagaacaagaaaacgtggctccacctgggaatggtccttcgagggagccaaaatcaatggcaaacgcaaccccatcagccagggagggtaccgcaccaaggccgaggccatcactgccggtacccaggccaaggccgaatacgactctgccggccgcaggtttaccccttcggacatcagcgtgtctgactatcttgactactggtatgaaaactatgtcaaggccaaccttgcgcacaacacccaggtgggctatgagcgtttaatccgtgtccacctcaaaccggcatttgggaaataccggctggcatcattggagacagatgttatccaaaaatggattgatggaatgaagcgtcaaggctattccaggagcatggttaaaaatacattatcctgcctgtccggcgccctgggatatgcggtatatccctgtaaatacatcaagtataatccttgtgattatgccaggataccgaagatagttatgtctgagaaggccaaggcacacacagaatatatctgcgtcaaagaggactttgcagccatcattgagcgctttggcccggacagtaattttcacataccgctcatgactggataccactgtggcacccgcctgggggagacttatggcattgacttgctacatgacgtagattttgagcaccacaccataaccgtctggcaccagcttgccaacgagggcggaaagtggtattaccggccgccaaaatatgattctgtccggactataaaaatactcccggagtatgaaaatatcttgaaatcagaaatccataaccgcaaaaagaacatgctccggtacggccagtattttacaaagacgtatcaaatggacgatggcttaatctttcaggctcccgccaacgtcaaaattgttggcaaggaaataatgccaatcagcgcaaaggaaaacggagagctgttgacgccatactcatttaagtactgctctaaggttatccacgaggaattgggaaatcctctgttccacagccattgcctacgtcatactcacggcacgttgttggcggagaatggcgcccagcccaagaccgtcatggaacgtctgggccacaaggacatcaagaccactatggaccgctatgtgtttaacacggagaaaatgcagaacgatgccattgtaatcctggcagacgctatatcatagcagccttgcctaccacccaaaaaaagcgtaggcaaatggtaggcaaggcaaccaatacaagaacaaagaagcctgtcaatccttgattttacgtgatagttccacgacggtttcaacatgcaccgtccccgcaaacatatcacaacacttccctctctccaccacataccccccatctgccaagtacctcaaatccctggccagcgtagcagagtcacagctgacataaaccacccgttccggcctcattttgagtatagtatccagacaaaccgcatcacacccttttctaggcgggtctactacaatcacatccgcatggacatgattcttttcaaactgctccggcagtacttcctcggcctttcccacaaaaaactccgcattatgaatgccgtttatttctgcattcctcctggcatcctctatggcctggggcacaatctccacaccatacactttcttagccttctgagccaggaataatgaaatagtgccgattccgcaatacaaatcccaaacaatctcatttcccgtaagtccggcatactccagcgctgtcccataaagccgttctgtctgtacagggtttacctggtagaatgaaagcggcgatatctgatatttcacatttccaatataatctgaaatatatccaggtccataaaggttcacaatctccttccccattattacattcgttttttcctgattcacgctataggaaatactggtcatgcctttaatcccatccacaccagtcagcatctccaccagccgctctttaccgggaagcttgtttccatttatcaccagacaaaccataatttcgcctgtcttaaatcccttccgaatcaggacatgcctcaccaatcccttatgtgagagctcatcatagggctctatcttcatttccttcatgaactgctttacaatatccagaatctccctattctcctcaactcccaacaggcagtcctctgcttcaacaatggcatgtgtccgccctgcatagaatccggcaattacatttccgcccttatcttttccaaaagggaactgggctttgttcctgtatctccagggctcctccatccccataataggaagcatatgaatctcatcctcagcaaatttgcctatacgaatcagattattcatcaccttccgctctttaaatttcagctgttcttcataactcatggcctgaagctgacagcctccgcattgccttgctaccgggcatgtcggaatgacacgggaggctgacggttccagaacttccatgagcctggcaaatccataagatttcttcatcttcatggcctttgcccgcaccacgtcgccaatcacagcatccttgacaaaccagatatagccatctacttttcccacacctgctccgtcctcattcatatcctctattgtaacaataaattcctgattcttttccataccatttcacctgtcctgtattcaaactgttattatgctctattattgctctcgattttttcaacccattattttatctcatcgtcccgctatcccatcccaccatcccgctatctcatcccaccatcccgctatctcatcccatcatcccgctatctcatcccatcatcccgctatcccatccccgcccccattatcacaaaaggccgaaaacacactggtcaaggacacatcctgcaatcccgtacccaaactaaatgttttcagccttatatattcggtcctgttatttctctatattatccaaccttaacgcctattccgttgtctttctgatattagactccagcagcctgttgtatcccagccatcctttattctccccgccggactgcagcgcctctatcatggtctccatcttggcatccgtattatcggcaaagttgagggccaatgcctccaaaagcgccggcttcttgggggagccgtactctaattccccgtgatgggccagaatacagtgtttaagctctgtagccagcttctccgggaatcccggtatagagcggatgctttcacccaccatctcagtaccaatgataatatggcccagaagctgtccatcgtcggtataatcattctccgggaagcgtgaaagttccctggtcttaccaacatcgtggaagatagctgctgtcagcagcaaatcacggttaatcatcggataatatccggcatagtaatcacacagctttgtcacactgagcgtgtgttccagcaggccgccaacgaatccgtgatgcacggttttagccgcggaatggaactggaacgcctttgcaaatgccgcgttctccacaaaatagccgctcagcagcttctgaagatagggattcttcacacttcttatgtatcccagcagctcctcgtacattttctttatatccttctttgacaccggcaggtaatctgcctccacatactctccctcctgcgccctgcgtatccggcgtacattcagctgaaaggagctctggaacagggtcacatccgcctccacatgaacgtaatccatggtctcaaattccccgactccgggagaacccaaatcccatattttggcgtcaatggtacctgtcttgtcctgcattaccagattgccgtattccttgccattcttcgtgagggcaatctgcttgttcttacacaggtacacatctgcaatgtgcataccttccctgaaggtgtcgatatatctcatgttcaattttcctcttctttctattttataaatccacttttaaaacccacttgaaaaacccactttgaaaacccaatgattaccctgtctatacgcctggcaattcataccgccattcataccgccatcagttccattcattccactccctgacagcaacgcagccaggcggttaacactgcctggcccctttgcctgacttcttacattacctggcgcaaactgccacctgtccactgccacctgtccactgccgccgccgggtatcaaactctccggctgtcatctctgcccggctccaattcctttcaaaagcccagccgctacctggcgccaaccgtcaccgaaaactcaatttccgtatattcatccttgccgtttctcaggaccgccaccttaatcttatctcctgcgtgcaggctttccacctggttctggaaatccttcaggcttcccaccttctcgccgttcatccatgtgatgatatcccctggctgtatgcctgcgttgtatgcagggccgtctgtcactgccgatatcacataaataccggaaggcattccgctgtccgccatggcctggctcacttcctggcccttgatgccgaaatacggggccgggataccgttgctcatcatttccagtatacctttatagtcagatatggccaccactgtggtcatcctgcacactccatcctcgtcgtatttgtccgtgacccacccgatgagctcacccgaagtattcaggagaaatgttcccgcctccgcgtctccgctggcgctggtatagaacaccctggagctgccgtccaccgtatggacattgcgcaccacataggatatatttccataatcgctggaatggacaatacccgccggcgcgccgatagccaccaccatgtcgccctgctttaccccgtaagagttgcccagcttgatggcctccaccttcttaaactgctcgctgtccatctggcccgcgtccacgcttaccacagacagtcccataatggtatcgctctgcttcacgattccggccatcatggttccgtccggaaacgctacctcaatggaatcagctgcctccacagccttgtccggcgtgagaatcagtatctcagtgcgggtcctggctatgaccactccggagaactgtcctgatgtctcgatgggattgtcaaaccagtccttctcatgctgaatggaatggaccaccaccagactgtcatccgcgtcactggcaatggtgcgaagattgctgtacagtttattcaaatcatcaatggaataacggtacttctccatctcagagcgtaccatctcatccactgcctcggtcatggccggttctgtgggctcagtctctgccgccgcaggagccgtggtttccggctcatcctttggtatggtaatctggctgctctcctcaggagtctcctgacctaaaatcctttcagccacaggtctgctcacaacaaaacaaatggccgacaacacgccaaacagaacggcacaaaaaatggtcaacaggattttccgggcaatctgccgtctggtcattggctgccggacaatcttctcattaataaagcgatgggacttgtccggagtctggtcctgccggtctaaatctctatgctggtcagcacgtttatccgccatagtactcctccttgcgaagactcttaccctctattatacgtttcttcccagtattatgcaagattttatatatgaaaagatagtaaaaaagatagtaaatatcgttttttatggtataatttaaatgtcggcttttgggaaaaagtccttttaaatccagcatttttacggaaatcacaggtgaaatcaatgaatcagaaagcgttaaaaactttagaatatgataaaatcataaaccagctcacagaatatgcggcttctcctctcggaaaggccctctgccagaacctctctccttcctctgatttggaagaagtgcgcacctggcaggcacagactacggatgcagtgacacggatccgtctcaaaggttccgtgtcattttcaggtatcagggatatcggagattccctgaaacgcctggatatcggcagttccttaagcatacccgaactgctctccataagctccctcctgaccgtggcagccagagccaaggcctacggacgccatgacggggaagatgacgcaaggggaaccggcgaaccccaggatgacttcgactccctggaacccctgtttgcgggactggagccgctgacccctctgaacaatgaaatcaaacgctgcatcctctctgaggacgaggttgcggatgatgccagtccgggattatcccatgtgcgccgttccatgaaggtgacagctgaccgcatccacacccagttaaactccatcctcaactccaaccgctcctatcttcaggacgcagttatcaccatgagggacggacgttactgccttccggtaaagtcagaatacaaaaaccaggtatccggaatggtccacgaccagtcagccactggttccacccttttcattgagcccatggccattatccggctgaacaatgagatgcgggaactggagatacaggagcaaaaggaaatcgaagcggttttggcctccctgagcaatcaggcagcgccctgtacagaggagcttcgcatggacatggagcttttggcgcagctggactttatttttgccaaggcaggcctggcccgccattacaagtgcagcgcccctgtattcaatgacaacggctatatccatatcaaggacggacgccatccccttttgaatccccaggccgttgtacctatcaacgtatggctgggcagggagtttgacctgctaatcgtcaccggcccaaatacaggcggcaagactgtttccttaaaaacagtgggcctgtttacccttatggggcagtccgggcttcacatccctgcgtgggagggatcggagctggctgtatttgaccaggtattcgcggacatcggggatgaacagagcatcgaacagagcttaagtaccttttccgcccatatgactaatattgtgcgcattttaaatgaagccgattcccggtccctctgtctttttgacgagctgggcgcgggtacggatcctacagagggagcggccctggccattgccatcctctccttcctgcacaacatgaagtgccgcaccatggccaccacccattacagcgaactgaaggtatttgccctcagcacgcccggagtggaaaatgcatgctgcgaattcaatgtggaaaccctgcagcccacttaccggttactcatcggtattcccggcaagagcaatgcctttgccatttcccagaagctggggctgcccggatatatcattgacgacgcaaaatcccatctggaggccaaggatgagtcctttgaggatctgttaaccagtctggaatccagcaggctgaccattgagaaggaacaggctgaaatcaacgcctataaggatgaaattgcctccttaaaaaaccgtttgacccagaaggaagagcgcctggacgagcgcaaggacaagattcttaaaaatgccaccgaggaagcccagcgcatcctgcgggaggccaaagaaaccgcggaccagaccatcaagcagattaacaagctggctgccagctcaggcgtgggcaaggaactggaagcagaacgcgccaggctcagggaccagttaaagaaaacagatgaaaagctgactgtgaaaccaaagggacccagccagcccatctcgcccaagaaactgaaaataggggacggtgtcaaagtgctgtccatgaacctgaaaggcaccgtaagcaccctgcccaatgccagaggcgatttatatgtccagatgggcattctccgttccctggtgaatatccgggatttagagcttcttaatgaaaaggacataagcgccacactgggagacggaagttccataagctatggtggaaaggccgccagaggcaagggaagcggcagcagccagattaagatgtccaaatcctccactgtgtccgctgaggtcaacctcataggcatgactgtggacgaggcagtgcctgccatggaaaaatatctggacgacgcctatctggcccatctccagacagtgcgcgtggtccatggccgtggaaccggagcccttaagaacgcggtgcacaagcgcctgcgccagctcaaatatgtaaaggaattccgcctgggccagtttggagaaggcgattcaggcgtaaccgttgtgacatttaagtagaaatcagcagcaaggaggaactatagcatggcagagaagcagaggattctgattgtggatgatgatgcaaatattgcagaattaatctccctctacctgatgaaagagtgttatgagacaatgattgtgggggacggcgaggaagcccttaaggtatttccggaattcaagcccaacctggtactgctggacctgatgcttcccggtatagacggttatcaggtctgcagggagctgcgcgcttcctcccaggtaccggtcatcatgctgtccgcaaagggagagattttcgacaaggtactggggctggagctgggggcagatgattatatgattaaaccctttgactccaaggaactggtggcccgcgtcaaggcagtgctgcgccgttaccaggcagcaccggccccggctccatcgtccactgaacagcagggcgagtacgtggagtacccggacctgattgtgaaccttaccaattattccgtaatctatatgggccactccgtggaaatgccgccaaaggagctggagcttctgtattttctggcggcttctcccaaccaggtatttaccagggaacagcttctggaccatatctggggttatgaatacatcggggatacccgcaccgtggatgtacatatcaaacgtctgcgggaaaagataaaggatcacaacagctgggccatcaccacggtctggggaatcggctataaattcgaggtgaaacgatgacccgttctctttattccaaatttatactgggatatctgattttcggtctgctgggttttatcgccattgccacattttcatcaaaaatgacccgtgactatctggtccagagcaaggcggacgcgctgtatgacgaggcaaatatcatcgcctcgtcatgcagcaccatgtatcaggggaaacggctggattccgaggaggtttccacccaaatacgggcgctgtcccactatctgagagccgagatatgggtggtcaaccgacagggcaccgtggttatggacagcctgggcggttccagggtccagtcctccataaacggctttgacccggcatccatcggaaaccggtcctataccataggggattactatgggatgtttagcgggaacgtactcagcgtgtcggcacccatcacagggaattacaacacctacggttatgtgctgattcaccttcccatcagcgaaatcaaccagtcccagaacggcatcctgagcatcctttacatcacatccgctgtcctgttcggcctgtcccttattattcttctggtatttacccagaccgtgtacctgccccttcgcaagattacagtgggtgccaatgaatatgcggccggaaatctggattaccggattgatgtcaagacccacgacgagatgggttacctctccgacaccctgaattacatgtccgatgagctgaataagatggaggaataccagaagaatttcattgccaatgtatcccatgacttccgctctcccctgacttccatcaagggatatctggaagccattctggacggcaccataccggctgaaatgtatgaaaagtacctgtccagagtcatatccgagacagaacgccttcacaagctgacagagagcatgcttacccttaactccctggatgccaggggctacctctccaggaccaattttgatatcaaccgtgtcataaaggatacggcagcctcctttgaaggcacctgcgagtccaaaaatgtaagctttgatcttaccttctcagacgacatccagatggtctttgccgaccttggaaaaatacagcaggtcatgtacaaccttattgacaatgccatcaagttcagccatcacgattccaccatctacatccaggcatcggggcggtatgaaaaaatatttgtgtcggtcaaggatacaggtatcggcatacccaaggacagtttaaagaaaatctgggaacgtttttacaagacggacctgtcccgcggcaaggataagaagggcaccggactgggcctgtccattgtaaaggaaatcatacaggcacacggcgagaacattgacgtggtcagcacggaaggcgtgggaacagagtttattttttcactgccccgttccactaacctttaggaaatgtctgtaacaccggatttcaggagcttatgggaatgtttcccagtatacaaatgttttataatatcgtaagatatttaccaggaaattgtgatatagttatattatggtgaaatgtataattcattccaaaatgatttagaaagaaaggacaggcagacatgattacatggaaaaaagtgggcaccgcattgttagttgcttcccttatttcttccgtcctggctcctgcagccatggcggcaagcaagaaaaaggtaggcaagatttacctcaccattgactccgacatacgcaccggacgtgatggaggagatgtggaggtcactgctaccggagacaataccggtctttattatgtagactcctgggaggtcaccaatgatgacggagacacctggagcagttccaaaccgcctcaggtagacatcatcctgggggtggaggatgaggaggaatactatttttccaatacatcatccagcaactttaagctgaccttaggctcctccagcaaataccgctttgataagattaaattcgtaaacgctaaacgtcaggacagcaacgccactcttatccttacggtccagctcgtatttgacaaggatgcggataccagcgcagctgctgccccctccaaccttcagtgggattccgcccacaacggtaacggttcctggaacgaggtttcaagcgccaaatattatcagacccagctgattaaaaatggagctgccataggcgaaatcaaggacatctataatacctcctatgatttcagggagcagattacggcacccggcacctatcagttcaaggtccgctccgtaaagtccagcaacagcgccaagagcagctggaacacatccggctcatggacagtaagcgaagcagatatcgctgccctgggcaatactgtctcggacaattcccagccagcggcaggcacctggcagacagcagcggacggccgctggtggtacagcaatgcagacggctcctatccggtttccagctggcagcagattaacggccagtggtactattttgacgcagagggatatatggccacaggatggattgaactggacggtaagagctattacctggatccttccaccggagccatgtatgccaatacacgtacacctgataacttctgggttgatgcgtccggcgtatggattcccggaatgtagctggattcccggaatgtacctgaccgggtatttacaggcaaaagatacgtaccacttggaaaaagttcatttatcagacaaattatacaaacaaggagcaggcacattgaaacaaaggtgcctgctccttattaatttgctaaatgtgtgtataccttgataagcccttgcagctttagccatacagtaccggccctacaataccggtcctacaataccagccctacagtaccagccttgcggccccgtatatgcctgcgtcatttcccagggtggcaagtcccagcttacccttgtactcggatatgggggtaaaataatcataatgcttctggataacatcaatcagaaactgtcctgccttggatacgcctccgcctataacgaaaatttccgggtcaacaatcatgaccgccatggataaggccagtcccaggtagcgtcccaccacatccatcacttcgttagccagctcatcccctgctttggctgcgtccagcacatccttggccgtgacatccgcgccatattcccgcagggcagatggcttatcgctggcttccatcttccttctggcctccctggctatgcctgtggccgaacaaatctgctccacacagcccactcctccgcagttgcagtgctcccattcctcatctcttacgtgaatgtggccaatttcaccgcccagaccgtgacggccggcaatgattttctcatcaatgatgacaccgccacccacaccggttcccagggtaatcatgaccaaatccttatatcccttgcctccgccctgccacatctctcccagggcagccacgttggcgtcatttccgctctttacagtgactccgtccagcaggcggctgagttcttcctggggattcatccgccgccatcccaggttaacacatacctccacaaatccatccggcatcaccggtccggggactcccagcccgatacctacaaggtccgtcttgagactcagccctctttcctccatcctggcacggatggaccgggccacatcaggaaggatatgcgttccgccttcctccttacgggtcttaacttcccacttgtccaaaagctctcccgtaatctcaaaaagtccgatttttaccgaagttcctccgacatctactccgatacatttcatccccatggtatctatacttcctttcacttttattcctgcatcactgcagctttatttccgtcattttctgaggtcccatgacaagaagcgttcccgggaatcttcctgctgataccttgctgaccgtaaaatcaaatgttccgttatatttctccgtacctgtcatgttgtaaaccttgcaggaactgtcattatacaaaagaaccaaatcaccgtcaatatcaaatccggtatactggtagttaaaggtcttttcaaaaacagggcttccttccctgtcataaattctcagtttgtaaggatcgccgccttccacattatctgtaacaatgccaaccttatcctgagcatatgtaatgctccttatattctcctctatgggaatctggctcaccagctccggcgatgtctccactctggttgaaaagaactgtattcccttatccgtaaatatgacggaatggctttcatccagaaacctgaccctgcccgccatggcatctcccaagtccttgggaaagaatatacccactacgcggttgggatcatttttacccagtccgaaattataaaatacaatcttgcattttatcacaccctgatccagatacatataggatgtgatgagctgcgtgccatttggcgaaagacttaagtccaccggatacccatcccctgacagcagagactttaccatgatgtccagagggcttccatctcttttatataaatagatatagctggccttggaatcctcctgaagggcagccaccacgcccttggcggacactgtaaccctcaatatgggcagcagcgtggtggcctggccctgggtcccgttcttatcgcatatgtagatgctgttgccctgctggtccccaatggccacaaaatcgccgttgaccgataccacgggggttctcatctcatagctctgcacccataccaccttgcccttggcgtccagataggtagctccatccttggtatatttgaggactccgtccccgaaatccctgtacccgcagaagctcccttcaccctgggccgcggcttcctgggcttcagccaccaggtcccgctcccatactgtctggtaatccgtaaaggtatgataacgttcatagcggaacagcaccagggctgctatggctgccaggccaacaagcacagccagaataatcaggcgcttcctgactacacgctggtgcgccttgtgaacgatttcccggctgtcctcctcttcctggaaggaactgccggaaggtacgatttgacgcttcagctgcttttttttattttcacggctcatagaattggtactgcccatcctgcgttctcccaaaattcgtcttttgcgtatatgcaatagtatacaacaattttggataaaacgcattatctttttccgccagaagtttccaggcatatacttatggaatcaaaagcttttgacctgcaaatatgctgttttcatctgtcagggaattaaccctgcagatttcatctatatgctgcagattatgatacagcttaaagcagattccgtacaatgtctccccatccgccacggtatacaccttgtagctggcagaagacacagtctggtcatcagcttcccctcttcctccggttggcggcagagtggaatcatcggccggagcttttgtctgggctgccgcctggctattaccggactccgtctgttcatttttcttctgggctgaatcagtctgggactcacccttgccggatgtctggccattttcctggcctgtcccgcccttctggctgctgctctgacctgatgctgctgactggccgcttccctgaccggccgctgctgtctgaccgcttccctggcccgatgccgccgtctggccgcttccctggtccggtgccgctgtctgaccgcttccccggtccgatgccgccgtctggccgcttccctggcctgatgccgctgactggccgcttccctgatccgctgccgccgtctggccgcttccctggcctgtcccgcctgtctggccgctatttgacggtgccagtgtttccggtgtcaccctggagggcttctcatctccattctccggtgacggggccgtagtgggatatacctttcccgatgcctcctcaatcacataatcaggctcgtccgcagcggaccagccctttccggaaggattttctgttccgcccttacctgtaaacgccatcaggccgtcctttatatttccttccggcaccacggacgcaatcacactttccatctggtgcattttctgataattattgaacatggccacgccgcctgccagtaccgtcacagccaggacgctgcacagacccgacaaaactcccaccgtgctccggtggcgtcctgcctccacccttcgctcgtccattttctgcttaaagttctggatgaccttatcatccactcctgtttctgcccttggcacatccttgcgcagtatcatgtaatcctgcatcatctgattgcgctcataatatatgctgtatcctctcaacttgtaaaatccgtcagaggatgttatgtaaacagcttcctcgccctccagaccgcagttcagatacatgagctggttctttcccgtaaaatactgactgtgctgcttccaataagtcagagggcttaaggtacagccgggtcctgcgcagagaaaccatccctggaccgtgcgtttgggaaacatctgctccacatcctggtaggcctttttccaggcatcctcggtgaaggccacttttccgccttcctcggtgactgaatccatttccagggctccatccacaaaaacaaagggtatgtcctcatgggtctccctgcttcccaaaagcagacccacacgcaaatcagccccctttgccggctggaggcgttttaaataagtatttacataatcttccagatataattttaaaacctggtccctctcacctatctgccggaaattcttcggcagcttagggaagggttcatataattctcccatagaatcaccccgctgtttttaatccaaacaagcatagcagattcccggcgcagaatttgtcatattatggcagcattttcccataatcgttcgacaagaaaaatgctttcgcaaatacagtccgccattttcatcaccatggacaggcgcacgctctggagcatgaccggatcccggctgcccactccgcctacgattccggttatggctatgtcgcccacggcctgcagttccttggacactcccagtcccggctgaagcgctccccgccccagggtcgcgtatcccacatggtccaggcttcccaccgaagcatcaatggcaaccaccacatagtcaggatagtgaagccgtatatacctggcgtacaaatccagattcatggcatggaccggcttgtcaagtgttccgatgaccgcggctcccttaagccgccggctgcggagcatatgtcccaccagagggcccaggctgtctccggtagaccggtctgtaccgatacacaggaacatgattccgtcctttcccttggctgccatctcctctctgataagccggtccaggtgcatggcaaagccctctgtttcaaaaccttctgatgtattataataagatatgtcttcccgtttttgtacgttaaatgttttccataatttcatagctaagttgtccacccaaacatgttataatcatcgcccggcttaagtgggctgtttttatagtataggcttgggtatttgaaattatgcatgaaaaaaggacacacggattgacagtatccgcatgtccctgtctgcctgtctgccatatcatggccgggccagaacctttggggcagttccggccgggcagttttttattatatactgcttatgtcttcagtctgtagtatcctcttattaaaacagcttctccttatatacccctgattggatcagccctctgatggcgtccgccacggcctgtttatcttccctgtaggtaacgccaaaccatttatccggggtgtcaaggacggtcactctcgccttcttattctgtaccagattgtctatgattttaggaagaaggtattctgatttaatatcaccctctttcagattgtccaaaaataccgggaatcccttctccagctcctggacaaagctggccggaagcccccacatattcatggaaaccggctgggacgggctgatggttacaggcgcgccgctctcatccgtggcatggagcccatcttccttcatctggatattataagtctctgtcacgtttgtcagataaccttcctcatctacctggcacacgcctctggtcactgtaccgttatcgctgagggtgttggacagcacaaaacctcccatgcagatatcatagatctcagactgtgagtccatatgctctgccatgtaatcgtgaatcctgcgaaatccttcccgtccgtaataatcatctgcattaatcacaaggaacggtccgtctaccatacccttcacagaaaggactgcctggcctgtaccccatggtttggtcctcccgggcgtcacttcataaccggctggaaggtcctccagttcctggtatgcgtactccaccggaaggagtttctctattctgtgtcctatgatttccttaaaatctttttcaagatctctcctgataatgaatattaccttattaaatcccgcttccatggcatcgtggattgaataatccatgataatctcgccgttgggtcccacgggctccagctgcttgatgccgcctccaaagcggcttccgataccggcagccatgattaccaatgcagtatttttcatccttagcttctcctttaatttaaactggttacactatagcacatttgactttaaaaggcaaagggaaagaatgtctcctgccgtgccagctcagtcagaacacgcctgcagcggcacacatcctcatagggcacatactcattgggcttatgggccagttccaggctgccgggaccataagacatgcagttgcagttgcccagggttcctgcgataaccgccgtatccgtatagccgttaaaagaaccgacaggtgtgtcctctcccgtcacacggtcgcagacagacttaaggctggccagaagccgggaactgctgtccttttccacataaggacggtcacccgtaatgaggtaactgcccctgacccctgcaatctcagcttctgccgcctttacagcttcctctactatattcttcgctgccgctgtatccgtaggcggcaccagacgcatgtcaatccataccttacaggaatccggcacaacatagggacgatacccccctgtgatctgcccaaaggtcaccgtagacatgcccagatcctcatggggcggacagctgccgatggccttccggatatggctgactgcctctgccatggcggcaatggcgtcagcgcccttccatggattactggcatgggctgtgattccctgtatggtcagttcaaaccaggtccggcccttatgggctacctgaatctggccgtccgttggttccgtatccagtatccagtcttccctgcctacccagccgtcgcggatagcgctttccactccccgcataaaatcttcctcatccacggttcctatgaatacaaagggacgcgccggaagctcccctgtgcttccggtcaattccaccatatctgaaaatgcagacatggcgcaggccaagcctgacttcatgtcacaggcacctcttccgtacaggcggccttcctttaccactgctcccagggcaggagtctcttcctcccatccctcccccagcatcaccgtatccatatggcatatgtacacaagggcaggcgccggagcttgttctcttcccggtatgcgggccataagattaaaacggcccggcatcacttctctttggaccagttcaatttggttcttaagcgctcctgccttttcctctatctcttttgtaaaccattcatatatccactgttcaatttggccctcataggctcccggatcagaactgtcaatctgtaccagctgtcctgtcagctcccaggtcctgcggtccccctcttctgctgtcacgttatcgctcctcctgtcaatcatataatcggataccaggcgtctgctcctgcatctgttcctgcgtctgacactgcatctgacactgcatctgacactgcttcccatgccggtatccctgccccattatacccccttatctataaatcatcaacaatggcagcgctttttgcataagccgtgctctttgcctcaaaaaagtctgttttcaccatatttgcattggaatactggttcacccatttcatggactgcggctcctcgtcatacccctcgtacaaggtgccgaagcccagcccgctccagcgcaggtttcccagataccgtatgtagtccgtaaccatttctctggtcagacccggaacatcatcgccaatcacatagcatccccactggatttcctgggccacgccctcctccagcatggacctgagcatatctaccatcttaggcgtgaataactgcggttcctctttcctgagttcggcaatcatgctgcggaataaccacaaatgggtattctcatcccggttgatataccggatttcctggacgcttccgggcatcttgccgccccttcccaggttataaaaaaacatgaacccgctgtaaaaataaatgccctccaggatatagttggccatgatgaccctgagaagggtcacatcatccttcttctcctggaattcattatacagatttcctataaatgtattgcggcgcagaaggtgttcatcctccttccactggtacaatattctgtcccgctccaccggactgcagatggaatccagcatatagctgtagctctggctgtgcaccgcctcctgaaatccctgtatggtaaggcacagattcacctcattggctgtgatatactgggcaatacagggcaggtttgctgtctggatggaatctaagaacaccagaaagctcagtatcttatcataggcagtccgctccgcagccgtcaggttcttataatcctttaaatccgcgctgaggttgatttcctccggaatccagaaattattcatggcctggcggtaccagctgctggcccaggtgtatttcatattattaaagtcgttgagattggtggtatttccgcctatcatcctccggctgttcttatccgtatcgccctgagggttaaacaggggcttggctgacaatatactcatatcaaaaatcctttcttacatgcctttctatacctttcaacagcagcttaactggaacagctctcgcactcctccacctccaaagacttgctgcgcacatagtagagggtctttacgccgctctcccaggccagtatatagaggttcagcagctgccgcatggtataatcgttggtaatgtacagattcacgctctgggcctggtcaatatgcctctggcgcacacctgcggcccgcaccgtccaggtctggtccatggtgtatccgcttttatacagccagaaggtcctgggtgtcagatccggggccaccctgggaaggatggcgttctttttctcttccagataaaaccgcttcatcacaggatccaggcctgccgttgtaccggagagtatgctggtgctgctggtaggcgccacagccaggagataggcattgcgcattccgtgctctgccacctgttctgccagctctttccattccctgctcacaagcccccgcttctcaaagtatgcccctgtctgccattcgcttccctcaaaataccggtagcatcccttctcagccgccagattggcgctggccctgacagccgcgtaatgaatccgctcaaacacctggtccgcaaagaccagatgttcctcgctctcccaccgtatgccgtgctttgccagcatatgatggtaaccgctgactcccagaccgattcctctgtaattctgattggtaattccggcgtaggccaggggataaaaattcaggtcaattacattatccaatgccctcacagcactggcggcaatatactccacttcatccggatcatccacatcaatcgcccccagacagaggctggccagattacagacaacaaaatctcccggccgtgtggtctggaccaccgcggtctccccattaacctccagcacctgagttgacacactttctatgggagacatgttctgggcaatctcggtgcacaggttggaacagtatataatgccccggtggctgttggggttggcccggtttaccgtatcccggttaaagataaatggtgtgcctgtctccaccgcggacttgataatcaggcgtaccacatcctttaacaacacagtgcgcttggatatcctgtcatctcccacgcagtccagataccgttcctcccacagctccccatagcagtcctccaggcagtatcccttgacggtccggatctcatgagggcacatcagatgccagtcctggtccagattctcctcagccatcttccagaataaatcaggaaaacacacggccgggaaaatgtcgtgggccttcatacggtcatccccgttattagtacgaagctgaagaaactccggcagatccttgtgccaggcgtccagataaaccgcggcagcgccctggcgcatccccagctggtccactgccacagccgtatcgttcaccagcttaatccagcggatcacgcctccggcagccccctcaaatccccgaatcctgcttcccgttgccctgacctttccgaaatacaagcccatgcccccgccaaatttactgacctgtgcaaagttgtccacgcttctgtaaattccttccaggctatccggcacagtgtcaataaaacaactggaaagctgatggtacggtttcctggcattggacagggttggggtggccatggtaacctgcatacggctgagcatatcataaaaccggcgcacccattgcatcctgcaatccttactttccttcatggccaggtgcagggaaatgcccagatacatttcctggggcgtctctaacggatgatgactgtggtcctggatcacataccgcttaagcagcaaatccagtcccgcataggtaaagagcttatttctctcatcatcaagaaatccttccgcctcttctatctcctcccggctgtaatgcttcaggatataatcaccatataacccctgttccgtcagatatgaaatcttttcatacagtcccttaattcccagtcccttaagctgttcctccacctcacaggcaaaaccgcagtaccgcagcctggccgctgcaaattcccacaggggtgtttccttggaagtcagttccgccgcggaccgaatcagggcttccattccctcagccggccccattcccggtttgcggaaggagcggtatctctcaagcagacaatccagtccatatccctccccctgaaaatcccttccgatttcttccagacattgttccagccctttatagtccaaatctatctctacattcgtatccgccatgatgtccttttgctctccttatctcaccttatctcattttctccggcttcctcttacttttctcctgccggttcctgtccttatctaattcctgacatccaagcataccatttccagatgtcacgctcaccattataaaccatatatatagtggttacaagctgtttttgcaccacatataccccaaatactgtattctcctttattcacaacactttcccggctacagttatatacttgtggctgtttcaacaaaaaatgtgattgcacttgtagtggtttcatcctattatatggttggaacaacaatgaatacgtggcattcatgccgcaaagggggtaaacttcccgcatatccgtcatccggatcaggtaagggaagcagggattatgagcgatatcaaaagtccattttggcgcactgccgccgaatatggcatcattacagtaagcatctggattatggtggttggaatctactttttcaagttccccaatcattttgcattcggaggcgtcacaggcttttccactgtagtaagcgaaatcagccgttggtctgccagtgatttcacatttattgtgaacacctcactgctggttttagggttcattttcctgggtaagggttttggaataaagaccgtttatgcaagtatggtcatgtccatcagcctgtccctgctggaacgtgtctgtcctttaagcaggccgctgacaacagagcctttgctggagctgctgttcgccatcttcctgccggcagtgggcacagccattctctttaatctgggcgcttccagcggcggtacagatatcatcgccatgatacttaagaaatataccagccttaacataggaaccgttctcatgctggtggatgtggcggccgtggcctcctcattcttcatcttcgggcctgagacaggactgttctccaccatcggcctggcggccaaatccctggtcatcgacgatgtgattgagaatctgaatctgtgcaaatgctttaatattatctgtgacgacccggatccgatttgcgactatatcatcaacacgctgcaccgcagcgccacggtataccatgcgcagggagcctttacccatcatgaaaagaccgtaatcatgaccaccatgaaacgcagccaggcattaaagctgcgaaactatatccgcaccattgaacccacggccttcatgctgatatccaactccagcgaaatcatcggaaaaggatttctggccgggtaggcttcggcacaattttcctggggatcagcgttttttcccatgtcttatacagcaattaaaatcaaatcaaatataaaacagcggcagcgaaatccggtgaacactcatccgattcgctgccgtatttttcattccgcctgtttcagtccgcggtttcctctttcagaatcccatccccgcttccgatggtacccagacgttccagcagtccgaacatgtaatccgtataccgttctgccacctcaatcaccactgcgtccggctgaatctcaagggccgccgccccgcagtcctctgtccggtaatccatcagcgtcacatccgggtagttcctggcaaagtactcagccatgtgtaccccgaaggaatccctgcaaataaggattctttctgctttcccctctgcgtctgaggagtagtgggtgatggtctcatgttcattctggtaatccatttcaaaggacacatcctccctgtagcctgacactttgagaaatgggtcatcgtcataatacttctgaagattcagcatggttgccaggtccccgctgaaggttcctctgttttcaatatcataagagcggtatgactccggtccgaacggcttcccgtctatgtcctgtatcaccatctgggatgccataaatgcccccatatcattccaatgggtatcatacttcctgtatatctggcaccagtcatccttggcctttctgaactcatccagggggtagtacacatcacagtccgtattctctttcagatattcgtacagcaaatccgccttggactgttcctgaaccaccttcacggatgagggcataaactcgctgtatacctgctccttattgggaaccatatagaaaaccagctttatccctttggaggccagattttcctccgcctgcttaagcagcgccgcaaaccgttccatctcatcaacactgtaatgattggttccctggtagtccgcaatgctgtcctccatttcccctttcagcttatagaacatccatccgtcctttcccataagaacggcatcggacgtgacttccccaaacacataaatgtccgccagtttcccaaaggccacaatgggattcttaaaggccagatggtcattaaagtaggcgtcatactgccccggataggatttaaggtccgctgcagaaagattcctgaaattaagaaccggcttttcctggtaaacccggttctcgtaattctccgtgtccacataatccttaagaggtatgaacaggagtccgggcagtatcatcatccccaggaacatgcatgcaaatatatatgcttttatgcgttgtctcacctgctgcctcctctctaaaaccggaaatagataaacggattataagtgctgcccacagccatcacaatcgagtatgcaaacagcagtataagtcccaggctttcagacaggtaaatgcttctgccgtcctgcatatgtttcttaaaacagggaaccagggcctgaaacggaccgcacagcacaatccctatcaccatatagactattgtcttatggctcatgtacatggccgtatcataaatccccggacgcagaagaaacatctgcttaagcagcataagtccccgggtcagcgaatccgcccggaacatggtccatcccaccacggtaacaaaaaacatataaatataactgaccgccgccggcagacactccagccgccgctttaaaaacagccgttccgccacctgcaggcagccgtaatacattccccacgcaataaaggacaggcccgcgccatgccagaatccggtacagataaatacgatcatcagattgcggcaggtaacaaatgtccccttcctgcttccgccaagaggaatgtaaaggtagtccttgaaccagctggagagagatatatgccatctgcgccagaactctcccacggacctggccagatatggataattaaagttctccgtcagctcaaagcccagcattttaccaaggcccaccgccatatcggaataaccggaaaaatcaaaataaatctgcagtgtatacaggattcccacataccatcccaaacctccgctgatctggtccatgggattggccagaaccttgtccaccacgcttccgaactggttggcaagtataaccttttttcccagtccgtagataaagcgccttgctccgcatgcaaacagttccggcgtcacatggcggtttctgatgcgcgcacccataccctgatagcgctcgatgggtccctgtatcatcttaggaaaaaaggacatgtaaagtcccaggttcagcaggttcctctcggcccctgtggtcccccggtacacatccgccacatacgatatcatctgaaatgtgtaaaatgagatgcccaccggcagcagcaggttctttggctccgccacggtgccccccgccagcttattgaccaggccggtcaggaaatcaaagtatttaaaataacccaaaaaacccaggttcaccgccaccagcagcacaaggagcagcttatccggggtaaagagagtgtgcttgccggcaccggaagccgtctggctgtctgtactgacggcagtccctgccgtaacccctgccgctccagcagcttccccaacggctccagccccagccagcccagccccagtcacctccggcccagtctctgccgccccagctccaatcgcctccggcccggcctctgccgccccagctccagtcgccgccggcctgctgccccgcacagcctctatgcccaaagcacctgcataattcacagccagggacaaaaggagaagccatatatactcctgctctccccatgcatagaaaataaaactcattgccagcagaaagaagttgcttagccggatgggcagcaccagattcacgaccagcacaaagggcagaaacagccataaaaatatcatggaactaaataacatgaaatattttccttcctgaattcattcttccgtccgcagggtgcctgaaaatgcattacaggacgccggcatctgcctgatcccagccatttccccgcggtccggaccatggcgatattataacatgcctccacaggattttaaaggctgatttgcggagccagctgcacgggtgcacttagcttctgattacacgcagaagctttctttccgcctctttaaatgtccaagtgcatcattgtaccaaaaggccatctgtgttataattatttcattaaaattttccagggcagaccggaaacatgtttctgcctcatactgcccggcgcaatcatcacctctccggagcctgtttgaaaccgcctgcccgccatctggcggaacacaatttttaaacacgctctgatgcattatgagatatcacgaaagaaggaagtgttatggacctaaaattacaggtaaagcaaacccagactttgtcacagcggatgattcagtcagctgagattcttcagatgacctcccaggagctgaatacttatatcaatgaactggcattggaaaacccggtaatcgacattgtggagccccccactgctgaagagcagcgcgagtccattgaacagcaggaatggcttaattctttcaatgaggagaattactatctgtaccagcgccagaataatgatgatgactacgactttaaatccagctggaacattaacacggacgacggcgagactcttcaggactatctgtggtcccagctcatcacggaaaacttcacggaccaggaaacggaaatcatcaagttcatgctggaatgtcttgacaacaagggctacctggaagagagcacagagacaattgcctcctactttgggaccgatactgagatagtggaagatctcctgtctgatctccaggccctggacccatccggcgtctgcgcacgtacactggaggaatgcctgaaactgcagctggaacgcagggacatactgaccccggtactggaatccatcatcgacaactgcctggaaatggttgccaaaaaccagattccggccattgccaggaagctgcgcctctctcccactgaaactgcgggttactgtcagattattaaatccctgaatcccaaaccgggtgtatccttcagcagcagggaccagctccgctacatcatcccggatgtgaccattgtaaagttcaaggaccattttgacatcctgctgaatgaatccatgtatcccaccattgagcttaacagctactaccgccagatgaaccagaatcctgaatcctctgaactcaaggagtatctgggcaataaaatccggcaggccgagtgggtcaaacagtgtgtaacccagcgcggaaagacgctgatgcaggtatctcgggccattcttgaacaccaggaggagttcttcaccttcggacctgcccacctgaatcccttaaggctggcagatatcgcccaggaactggacatccacgaatccacagtcagcagagctgtcagcaagaaataccttcagtgctcctggggtgtataccccatgaactttttcttctcgcgcagtgtggctgtccaggaaagcagcagcagcgaaagcggtacccagtccgtgactgccgcagacatcaagcgtgtgcttcgggaaatcatagaggaagaaaacaaaaagaagccttacagcgaccgccttctgggtgaaaagctggcagaacgcggcatatccatttcccgccggaccgttgccaaatacagggaagaggaaggcattgcggatgccagcgggcgtaaggagtatgtgtaacaggatattcttaaagacatggcagactgtccatgtctttttgtttactcaaatacgcaggaatgaaggcggatttttatatctgtgggtatgacaaaaacaaatcacggcgaattaaggttattttactcaaatttcatcttgacaatattggagaaatcttgtaaaattgttgatgtcgctgatggaacagagcttgtaaggataattactgatgattcctgattgttcccatagacaaatgcccagatagctcagttggtagagcagaggactgaaaatcctcgtgtcgttggttcgattccgactttgggcactgaccacatagcgaagcggtcattacgcaggtgtagttcaatggtagaacactagccttccaagctagatacgtgggttcgattcccatcacctgctctgtaaaatgagaaaaagccttgaagaggctttttttgttttgtttaccttatatccacggcaaaacaaaaggcagcagcgcaatacactgctgccttttatgttctgattctctcttatatcccgctatttcccctggccataatgatttttggcaaaatccttcatcaccgctacattttcaggtgatatccctgccggttttccgcccgtggcttcaatcatgtaaagaattctggctgttgcttccaggactgttgctaccttaaacgctgcgtccatattctcacccacacagactgctccgtgggaatgcagaaggcaggagttggcttcctttcccaacgccttttcacattggtctgccagttcctcagaaccaggcagtgcatactgtgtacatttacaggtatctcccatggcctgggccgcctcatctattatcaggggaatatcctttccctgcgtagcgtataccatggaatacataggatgggtatggatgactgcgtttacctcttctctgtttctgtatatagccaggtgcagccctgtctcaatagttggttttctgtgaccctccacgattgttccatccagcctgcagaccactacatcgtcttccacaatggtactgtatttcatggcgctgggcgttaagtataccagtccggtctcaggatcgcggatactgatatttccccacgtttctacagtaagacctgaattctccagctttttaccgctctctacaatgcattttttaaagtccatttctgcctctcattctgctgccggcaggcagccctaattttttatggcctgaagtatgtttgaatcccatatgaaaaatccgtctcaaaactccagccctgttcctactcaaaagtctttaagtaatccttgaactctcctacattgtcctttgtaataacttccgttccggtgtcaatataggattccgcctcaccgccgtcaaatattttcagcatattgtccacgcccagttttcccatttcagccggatactgtgccacagttgccagaaactctccgttttccaccaggttcagggcttcgcttaccgcatcaaatccgataatctgaatctgttcctgcatatttgcttccttgatggctcttaaggctccgatacccatattgtcgttgcagcaaaagaaaagttcaacatctggattagcgcttatgatgttctgggcagctgtatatccctggtccacttcccagtttgccgtctgttcagccacaacagttaccgtgtccccggcgccttctatgaatccattgtaacggtccgctgcattggtctgtccttcaatccctttgagtatggctgtctttgttcccttctcaaagtttttcgccacatattcgcctgccagcttggcgccttcataattgttggttccgtaaaacggaatatccaggcctacattggcaaggctctcatccgtcagctttgtatccagattgatgataggaatgcctgcttccttacattttgtaagggcggattccaaaccgtcggaagaactgggaaccagcaggattccgtccaccttgttggcaatcatattctcaataatgccaagctgggcgtcagcgctggcatgctggtctccggcctggacctcaatcttgaccccctttgcctctgcttctactttagcgccgttagccagggtaatatggtattcgttgtttaaagtcatccccacaaatccaatggtcttatctccatagttacccgataccgcttctgcgctgctttcttcgtccttcccgctttccccagttgtatccgcggtctgggcatctgtctgctgttccttggccgtctccggcacagtctccttcggggtacttccgcatccgctaagtgccgccgccgacataaccgtgctcattgccaatgccatcactgctgccgtcatgtttcgcttcataatcaatttcctcctttatttgcaaatacttaatgtatttagctttcctactcactctggcgttctttcttcttatccgcaaacaccgcggctataatgacgatgcctgtgacaatggtctggtaataagtggcaacattcatgatctggagtccgcaggtcagagtactgagaataatggctcccaccagtgtatttccgatcttcccctttccgcctgataaagagattcctccgataaccgcggaagcgatggcattcatctcataaccagagccggcattcgggtctgcatatgtaaggcgtgacaaaagcatgatgcctccaatggctgcaaatatgccgcttaaaacatataccataagcacggttcggtttacattgattcctgaaagcctggcggcgcagatattgccgcctgcggcatagacgtgcctgccgaactttgtatatgccatgacaaaaataatcactgcgtagaacacaaatacatatatgacggagacaggaaccgtccccagcacctttgaagccatcagactgcccagccccttagggaagctggatatgggctgtcctccgttaatcagaagcgccaatcccctggcgatctgcatggctcccagcgtcacaatgaagggcggtacctttccgtagctgaccagacagccattgaccaggccaaaggcagcgccggccgcgatacacaaaatccccatggcaatcaagggcataccagccttcagaatcagtcctccaaatatacccacaaatcccacaatagacccaacgctcaaatcaataccgcctgtgacaatgacaagggaggcgccgattgcaatgatggaaataatgctggcctgggtaatgatattgaacatgttattaagggtcagaaaattctttcccatcatgctgcagattacagcaaatacaataaaaataacaaccagtcccagatataaagtcaaggccggcagttttgccttaacaccctctttgtagctctccatacctataatcctccctgcatcgcatattttaatatggtttcctgcgtcaaatccggactgttgtccaatatagcctccaggacgccttccctcataaccgcaacccggtcgcacatcttaagtacttccacaaggtcggaggatatcattatgatagaggccccctgattgaccaggtcatacataatattgtatatttcgtcacgcgcccctacatcaattccccttgtgggttcgtcaaatatatatacatccgcattggaatacagccactttgcaataaccaccttctgctggtttcctccggacaggttcttggcttctgtaagatgtgtatgggttttaatccgcaggcttttgatgtaatcctttgcgcgatccgccatctcctttttgcggataaacggtttggcaagctgttttaagttaggcaacgctatattatccatgacagagtgcatgagcacaagtccctcatccttcctgtcctcgctcagatagacgattcccttttcaatatttctggacaggctgttggacaatgtttcacccttatacgtaacagttcccccatcttttctgtaagcgcctatcatgcattttgccacttctgtcctgcccgctcccactaatccggcaaatcccagtatttcgcccttgtgcagctcaaatgatatgtcctttaaaaactccttgtatctcagcttctcaacctttaatacaacctgattcatgtcaactgcttcattggcaatcttttcaaagctgactgtgcgtcccaccatcatctttgtcagctggtcctctgtggtttcggataattttacggttcctatatactcaccgtcacgcatgaccgtgcacctgtctccaatctcgaacaactcgctcatgcggtgggaaatgtatacaattccgattttttctttttgaagttcacggataattccaaaaagcatgtttgtctctttatccgtaatggccgctgtgggttcatccagaaccaggacctttacatgattggatatggccttggctatctcaaccagctgtttctgggccacactcagctcacggaccagtgtcttgggacttacctccaaaccgacccgcttcatgtacccctctgcctcttttatggcccgcttatggtccacaagaagcccctggccgtattcctttccaatgaatatattttcatatacaggcaaatccggtacaagattaaattcctggtaaatcacgctgataccggcgtccaaagcctccttcggcgtcataggcgccagctccctgccgtcaagctgtatgtccccgccttcccgtccgtatgcaccggacagaattttaattaacgtggatttacccgctccattttctcccaaaagaacgtgaacctcaccgggaagcacctcaagctgcgcatttttcagtacaggaacaccaaaaaaacttttgttaatcccgcacatcctcaatatacatccgtccatggacaggcccccttacccttctagtttttgataccgtttcaatgcctcgccggaatctttgccacagcaataagccgcactctcaatgcctgttcccaataggcgcctgatttcccccactgtcatctcaggcttaaagtacttaagctgtgcgcccagatttcccagggacgtactctccttgccccctgtcactaccttcttgcctgttgcatctgctgtcatctgacacagcctcacattccgcgagccgccgcctaccatatagacagtgtcttttttctttccgctgatttcctccagcccctgtatcaccgaggcaaagctcagcgccatggagttttgaaagctgcatatgattgtaccccagtctttttctccggaagcctgaccggtcttaacaagataattccatatctcatcagacatatgtacgggattgaaaaatctggaatcgttgacaggaaacagcggaaccgccccctcacggcagtctccaaggctgttaagctcctcccagcctatggccccatgttccccttcatattcctccttaatgcgttggataatgaacatacccgcactgttccgcagcagggtgattttatcaaatgcccctatctcgttggtcaggcatctttttctcacctcttcgttcacgattggctcctctaactccatgccgataagcgcccaggtccctgtgctgacaaacaaaaattcttcctcctctgccggaatggccaggaccgcggcagccgtatcatgggatggcacgcaaataaccggtacatcatacgatatgcccagaatttcctttacattggagtgaagcatgccaatggcagtaccgtgtctcccaataggcgcaaacaggccggatggtatttccattgttttcaatgcttcttcactgagttccctttttctggcatccatcagctgggtcgttgacaattcgctgggctcattcaccatacagcctgtaaagagatagtttaagatatccggaatcatgagaagcttatgtccatgggaaaacatggactgcattttttccatcattcccttaatcatattaaccgaattaattttatcgcaaaggatacccgtctgcctgaacagatatgtcctctgctcatctgacatctgttccagaacctctgcccctatgctgttcctgtatgacaatggattctgaatcataagtccctgtttgtcaaacagcgcaaaatccacgccccatgtacagatcccgattgaatggatggttccggcccgctttaccgcctctttcaatccctctaacagtttttggtaaatcatcagtatatcccagtaaaaatactgatggaccctgaccatgtaatttggtatctgggaaatgacctccgtggttatctgttctccgtcatacacccccagaataaccctgcatgatgaattaccgcagtcaaacgctaccatattccgcttcatcaacacccctgcccctctcttattgaatttttattttcagaccgtatttttctgcccgctgtaccaggaataacaagtctgctttcttaagggacggcatattccccatctcatatgcacgtcctaacccctgatacttcggcagccccagcctgtgatagggtagaaatacaatctcagagatatgatccaaactctttatgtactcaaaaaaaccattgatggacgcctcatcatcattgcatcccggaatataaggatatctgaccgacagttccccgctgtaatgaccgcacagccattccagattgctgagtatcaaggtattgtccacgcccgtaagctccttatgcttatcaggatcgatctgtttgaagtcataatatatagagtcaacatgcccgtttatgtcttccaatgccttttgggggacatgcccgcatgtttcaaccagggtattataacctctccggtgcatctgctctccgacagctcctatgatttcactgtaatacagcggttctcctccgctgaacgtaacgccgccgccggacatcccataatattgacggtccttcagtatctcagtcagaagctcttcctcgttgtattttctccccatcatctccctggcgtccgcataacactccctgatgcatacaccgcattgcctgcacttgctctggtccgtaataaagccataaccttccatgtagcttatggctttttccggacacagaacgctgcatcttgcacagttgatgcagacatttgtcttaaccagaacctcggtccccgctctctgggattcggggtttgcacaccatctgcaacgcagggaacagccctttaaaaatataacggtgcggataccgcggccatcctctgttgcgaaccgttctatattaaatacattgcaaacccccatgtctgtgattccccctgttcgtcatccgccggctcatacaccgcattgcggtactttagctataattccagctccgccctgtttattacatccatctggcactccggggacagcgatgtaaacagtgcactataacccgaaactctgaccatcaaatccttatattcatccggatgctccattgcctccctgaacaccttgttatccaccacattaaactggatctgctgtccgtagttttcaaacagcaccttaatcatggcaattaccttctctttattctcatccgtatccagcgctcctttggacaggcgcatgttgaatatcgcccctttctggaaccatatgctgggcagtttcatgactgaattgcaggcggccgtggcgccttttttctccgagccattggcaggggaaattccattattcaccggctgtccggccttgcgtccgtccggcgtggctccaatgctcttcccaaaagcaatgttacctgtcacaggactctggctgtaggagtaacagcagggcaccggcccttttccatacttggaacttctgtatttatacctgtagctggagccaatatagtcctccagttcaactacccacttgtcagctctctcgtcatcatttccaaacttaggtgccttgtttaacagtatggccctgatttccggtccggcaggcactgtctccatatcctcataattggtgctcatggcatgaagcacctgctccatggtcagaagcttctgattaaatacaatttcgtccaatgctgccagggaatcccctgcgctgatggtacccgcagtaggcccgccgtctgctgagtacacggaaccgccctctacaaggtccatggccctctctatacagtcatataccagggatgaacggaatgcgttgatgtcctgctgtatatgaatttcatcattgatatgttccgtttccacctgcagtcccataaaataatccagggtctgtttatataattccatcagctcccttacactgccgcagtcctctgcacgtttctccaaatccacaaaatggtatccggtcttaggatccgtgccgtcgtggagtgtgatttcaagtaccttttccacattcagccatgggcctttggccgcaaaatcccattttccaggaatggatgcctcgatacatccgtccggtacccagtccacccggtcttcctcggcaattcccatattcttaagcgtcctgataaatgccttatcattgtaaaatgccggctgcccgccctgatgcctttgcgcagcctttaacgccttcatcatgaacccatcactggttccctcgaaccacttaatggatacggacggggtaaagagtctgacattttcacatgcttccacacacagatgggaaacttcattggttgcatccttcccatccactgtctggcccgcaatggcaagattaatgaacatctggtatcccaggaaaaattctgtatccggccagctcctgagcttattaagttcattgcatttgatgaagaagcactcgactatctccagggcctcttctcttgtgattctgccttcctccaaatccctcttataataaggatacacatactggtcaaaacgccccagtgagatggcatgcccattggattccagatggactgccagcagaatcatgtagatggactgaaccgcctcatggaaggtcctggccggattcagcggaacattcctgcatatgtcctccagcttaagaagttcccttctgcgtgtctcatccttttcctgctctgcctgctctttgcagcagtcagcaatacggcccgaaaacatcaccacggcctgattgccctgaagggccgcttcaagaaaccatctttttcgtgtattgcccggttctctggggtccagcctcttaagcttattctctatccgtctcatgacatcggataaacctttatctaccacgcctttataatctacaattacattgcccaggcccgctgcagacacccatgtatcatctatcacattggcatcccaggcctggttgattttctcgggaagggtctttctcagattttcatataaggactttcccttccagtaatccacacattctaatattttgtctttatcttcctgggtatagtaaaatttatcacccggtcttttatccgggaaaaaaggtgaaccatttaactccgcttccagccagtctgtggagtactccggataaatcggggaggctttaggccactgtgcctggtttcccacaatcagctcatctgcattcacatagaccgtcatacggctcagcacatcataaaatgcctgggaccgcctcaaagcatttggttttccctctgtctccttcatggactccgtaaaatagatacaccgctccggacaaatacgcgggtctgtatcaaataaccgttttctcaacctttccgttcttgtattcatgttccgcccctcacattcacttcgtgtatgtaacttgttacattttcaatatagcactttatctcattcttgtcaataatatatttgtgcatttttcatattaattcattgttttttctctttttttagcgattttttcttatcagatcaccctgtatactgcaatcgcttgatgtgcaaagtaaaactgttacatttttacgtatttacatttaattttatttaaactataatatgaaatggtcggatgaaacttattttttcttttcatgaaacaagtttcaccctttcaggaccaggaggagaaatcgtatgaacaaggaagggcgtccggaaaatagcggatacatcggaatcagggatattgccaaactggcgggagtgtctactgcaactgtatcccgggttatcaataatccagaaatgacatctgaaaaggtcagaaagaaagtacaaaaagtaattgaggaatataactatatcccaaaccagcctgtcaagaaaatcttttccaagacaagcaataccattgccgtgtttatatatgacatggagaacccttttttcatcagcctgattaaagaactgaaccagatatgtctggaacacaactatatgctccttatttgtgatacaggaagcagcccggagcttgaaaagaagtatctttacttctgcctggctaaccgatgtgccggcatcatcctgacagagggtgttgattccgatatcttcgaagcctgcaagattcatattccaattgcattcctggaccgaaaaacccacggcaagttctccagcgtacgttctaataacagacagatgatgcagccaattgtggactacctctacaaccttgggcacagaaaaattgcctttgtcggctgtaaaacacccatggattctgttatttccagacagaatggctacatagaaacaatgacaggaaagggactccccattatccaggaatatatttacgacaaaaatccccagctgactcttcaggccggaagccaggctcttaattacttcctctcccttccagccgcccctacggcaatcatctgctgcaacgacatcattgccttaggagctttgaacgccgcatattccctgggattaaagattcccgcagacatgtccattgtgggatttgataatgtgatcagcaatctccatcagccccagataaccactgtccagcagaatctgcgtgaaatatcccttgagttgtttgagctggtggtcaacccgccggaaaatcctgtatccaaaatcattgaagcctccttcatagaaggagccacctgcagcaggatcgaaacagcccagaaataaaaacttatgccgggaaaccatccgaaaaagcaaaggctgtacaatgtgcttttccggatggtctggggaaatatctcaaaaatatttcagaaacattttaaaccaacaaatttaatccaacagataaaaaacctcttgatttatcagagaaaatatgatagactataccacgtcaaagtaataacatattttcatgcgcgagtggctcaggggtggagcaccaccttgccaaggtgggggccgcgggttcgaatcccgtctcgcgctttttttatttccagccggaggactgctctgccagttctccggccttttgttttcttcacatttaaagcctaaatacaacaatgggaaggcgccctcacgcgggtcagccttcccattttcatatcttatttctaattgccgggccagcccccggcttctacctcttctgtttgaccgtattaaggtattccatgattcccatgtgtatggtccaggccattctgtcctgatattcctcatcttccaggcgtttggcttcctttccattactcaggaatccgcattccactatgacaataggctccttcacatgaagcaggagataatagttgtcattggccttggccatcctcttgttggcctcgcccagcacataatcaaagcgcttctgcaaaatttccgccagatactttcccttctctgatgtcttataataaaaaacctggcctccggatacatactcctcatggtaactgttctggtggatgctgaccaccaaatccggcactgcctcatttatgatttcgcaccgttttctcatatctgccatctttttatgactgtctccggagctgtaaagcccctggtccgaatccctggtaaggatcacctctacatcggaggcctcaagatatgctttcagctgctctgttatcttcagattaatatccttttccagctgaccatttatccctaccttacccggatcgctgcctccgtgtccggcgtctatgaccaccaccggccttgccttgtctgcctccgctgcctgattatggacagccaccaatgttcctgcctgccatgatatcaatgccacgatacaaagcagcagaatccccatcactgtctgccatgctgaatgcttcatcaatgggcgctccctgataacctttattccagtatattcacccgcctgatgaaaatgaacctgtttttactccatgctcagaacgttataatcccgtaccgcatcttctatgatgtattccaggtattcatacaggatggcgggatagcagtactccttccacatggcgtatccgggctgctttactgcctccttcaccacctcatatgccctgcctgcgtaacacgcggcattgatgtcgccgtatacctttgccatctgctgtttctctgattctgtcagcttcacaaatacgctgcccgtctcctcctccgcagagttcttcatggcgtcataggcctgattatagaatatcctctttaaaacaggcggactgtatgtgtcgaagttcagcaggttctcatccgtgctcttgtttttcctggcccatttttccatatccaccttgcgtgaatagtaataaaatgtctcatcttccatgtaatccagcacgccgtactggcagggaggcgtggacagggagctggtgaccacctcatagataccgatgtcattatttctcatgaagtgctgcacatgcaggtgtccgctgagaaacagcgggatattctccccttccagcatctgaataagctcctcactgtgctcgatggtacaatcatccgcatataccttgctctcctccagcaggttgtgatgggcaaccggaagaagaatcacgctgtcacgggccgcctgcttaagctgttcctttatccactcataggtctctgtctttatcattccccctaccttgttgcggggttcatactggcaggtatccagcatgagcaggcgcatagacggtcccaggtcataggtgtaactgagggaattggcatccctgctgctggcctccgagtatccgaattccttatatatgcgctcaaaatcctccggtgcggtaggttccgccgggtaccggtctcccccggaatacacggaggcgcttgggttgttaatatcatggttgcccggtataaccaaaaccgtgataccggctttctccacctcatccagctttttcgccagttcttcatggctcttcttttccccctgaagacttaagtctccgctgataatcagggcatccggactcagcagcttaatttcctccagtgcggcgtctgtgatctcccatacataattggtcagttttccatcgccgtgctctaccatagactgaaacatatccccccggtccgtcagggattctgccagataatgtatatccgtcataaggataatgcgttttcctccaatcagaggctctgcctttgtctccttttctacatcaggaaaaggctgtatctgcgaaggcgcaggatgggtgggcttttgcagctctgtttcctgaactgtctcctgaaccgtttcctttgtctgctgttttccagtggtgggctccacctgctttccagcctgtacgctgcaccctgccatgactccagccattaagattgctgtcatgattcccgttacccttgttcttcgtctcatttccttcctccggcgtcacccatattgtctatttaacccctgacacaatatcccatatatccgctggctcaaatcccagcttccagcaggcaactcctgccaggtcaaactccttaatcaggtcaatcttaagcttcatggaatcctcctcttccatccatatatactgctgtccgcttccgctcacagtctcgccgtaatactgccccagcagcttatcccaggtaagctccacctggttttcctccacccactgcctggcatctgatatgccatatgccttggaagacgtcttgccctcatttacagtccacaccctggtatagaaggggaccgcattgatgaccttttccttgggaacctctttcagggtattctcaatgccctccctcacatagggaatagaggatacggagccggcttctcctcccgcatagtgttcgtcatatcccataacaatcacgtagtcagccacaattccctgctccttcctgttgtaaaacgcagtataggaggacggtacatagttatccacggacagcacaagtcccttattgcggcaggcaaccgacatttccctgatgaactgcacataatgtggtcctgcctccgccttaaggctctcaaaatccaggttgaatccgtcaaagccataggtatccgcctcattcatcagtttttcaatgagctttttcctggtactggtggaggacatcaaagtctttgtattaaggttcttgatactttcctgggtgctcacattctccaccatggcccacaccttcagtcccatgtcatgggccttatccacgtaatccttactggctaatgatgtgtaggttccatcgctggacaccacattaaaccaggtgggtactatcacattcatccccctggcattggacgcatagtcctcaagagtattatttccctcctgccgtgtgacctgatgaaatcccagccttactttcccgtccatggaaatgctggtatatacaggcgcctcaaaggtgctgacaggcgcaatctgctctcctgcctccagcttccggttctccacatatccgatgtaaccgtccgcggtcctgaccctggaccacttgtccatggtctccagcacatccacagtctctcctgccgctgcctccgtgataatctggctcttcacaccgcccttcactctgacctggcctgtctttttcagcactgccgtgtcatagggctgccaggaggtgtcaataaacacccgcttaatctggcttgtggcaaaggcctgcgtgcggatatccgtataatttaccacaactccaagagacaggtacattccatcctgtgtgaccttaaagagaggtcccttctcgccctgggtactttcgtccgcatacacaatggattcaggcagtgcatacacaagcagtttttcgccctcatcccagtaaaagcgctcgttcagatgttcatttacccagtccacaggcaggtatacctggccatcctcgtagattcccttctcctcctgcacctggttatccaaaataagggccacctggccgcccttaataccaaataccctgctcttatccgccagctcattgctgggcatgtatttcttggcaaaaaacactcccagaccactgcctgccaggataaatatgaacagcagaaccagcaccgtgattccgcagccgtgaccttgtcttcttctgctcatcctgtcctccagtttcctaatgattgtttttattctaccacaaaacagagtgtatgtaccaattatttgcttacaatttacagtcattatggaggaaacaggcacaaaagcccggtatgcgccgccttgctttggctgcacaggctgagacggtactcatggcggcggcataatccgggcttttgttatctgattttattgcctgtttatgaatccttatcttttttctctttgggagggtcgctgagatacactttgtcaaatctgatttccttcagacagccctgttcggcgccgacatagtctcccatataaaagcctccgtcttctcccatctcgaatatcttttcccattccttttccgggcactcgactccgtcaatggtaatccggacccctttgttcttgtatctcttcaatccgtccagataggttctctggtgtttcttccggtctccatactcgacatttcttatcataccgataagccctcccctattaccgcgggacagccggacggcagcaccaaggagttgtttccgtgacatacttttgtgcgccgttcccttctgtctcttttttcttcacaaaatcctctcaaaccactgcatggttttataatccactgaaaaagcatctactgaaagaggaaccctgaccagagaaatcccaaactgcctctctatctgttttctggtgtcctcgctgccaaaggcagccgtatatatccaccctgctctgcgtccttcctcctctgataaaagctccaaaaatgcctccagcttccattcgctcagtgccgccatgacaatcttcacttcacacctgagccactccgccctgatggatggtctcaattctccaaaatcaattatgatttcgtcatatattccacccagacaggacgccagtatgctggggtccccctgcatataatatgtaaccccgaagattttgtatctgtaatccgcagaatccgcctgctttacggaaccggcctggcatatatccttcatggttttccacgcgccatggtcgttccactcaattaccgcagtcctgcgctgcagggcactggccatataattggccgccaggacgctgagatgagtcacccctgttccccgtcctgttcctgtgattccgacaaccctgcaccctttcgcaggctgccggctgtgtttaaaatgatttctcttagaaaaccccatgattttaataagcctctttttcggttccatctcctgccgctgacggctatggcagaccacagcgactgaaaaaaggcttcttctcttttctgtctgaaaggattttcatactccggcgaaacaaacagctttattccctttaaggccttgtctgagcttgtcatggccttaagttccttttggcatatggtccgtgtcccccggaatacaagcacacggttcccatcacaccggcccgcccatgcctgattcatccaggatatgtactgcctgatgtaccggccgtcccaggcgctggcgctgcctgtccctaataaatctgccttccctgcctttaattccagctccgcctgctgccagtctgtcccatagtcttttactatgatatcaaatcctgtcccctcatccagctttacggcaggcccataccacggctttaagcagcagccgttcatggtatagattccaaaacggtccggacgcatacctgccctgcgggccatggtgtccactgcccgggaggcgttatgttcctcatacagcgcccggtatccgtttttgttcagaaaacataccagcccaaaggccaaatgtgtagtgcccgtcccagccttcattccggtcacaagcaaaatatgagatggtattgtcttttgttccttttcttctgtcagcttcctggtacacagcgcctgaagcgcatcctccacctcaccggcggaagcgtaccgtttctccatattggagtccatgcattttctgataatccgctcaaagacctccgacagggcggcagactgtccggcctcctctctcagggttccggctgtcataaaacggaggactgcaccaatggcataaatgtcggtcctttgatccaacatacggtcagaagcatactgttcaggagccgcgcagcccactgtaccgaatcgctttggggcaatgtttgcccaccggcagcctgcggcatgatcaaaatcaatcagctttacggtgccgttgcagataatcaggttatttggttgtaaatctaaatgtaatatgggtaattcacacgcagaatgcatgtaagccacaagcccgcagacctgcatcccgtaacggactgcctctgcctcttgaataggcccctgattcgcaatcagggcatatagagaatatccttcaagatattcctcgattaaataaaaaaattcagaatcttcttctaaatcatagatcatgggaatcccaggatggcgcagttcttttagcaccaatgcttcccttcggaaagtgtcatagtcggcatccctcttagaaatgcgctttatggccctgtattcctccaggccaatgtgcactgccagccatacggttcctgcccggcctgttcccaatttgtgcagcagacggtatttgccaaataaaatggtattccttattcacccctccttcgttacaatatcatctcatatcccaattttacccttttctttgtcacctgtctatggtcgttatatcttccatggcttttcatatgctatttatacaacctgaaaacatcctgcggcacgatattttttaaatttatattaaattatatatgtctttttgactatctttttatatcttcttaaatgtccgcaaagccttattttatcggctctacgggcattttgcttttgtggtaaacctcacatatctaggtctatcttcttatattttcgctatcaagcgtggttaaaatcgtggtaaatacttcttatgcgattagacgctgaacctctgattttgcagtatctatggacgcatgagcataccagttcattgtaatactgatatttgaatgccccatgatatactgtaaatctttcgggttcatattcttgcttgccagccttgtacagaacgtatggcgtagtgtatgcggtgtgatatgtggcaatgggttgtccttatggttcttattgtatttttttaccatacggacaaaaagcatagtgtaatcaatggcaactttgggcttgcctttgtgattgacaaataagaagttgccccgtccgtctatcacaaatggttctgcctttgggcgtttcttcataacccgttgaaatgcctgtatcgtttctctgcttaatggtacttgccttgttccgctttttgtcttaggcgtttcaatgtaatagccctgttccttgctttttaataactggtggtcgataatcacaacttcattttggaaatcaatatcggctactgtcagtccgcacagttccgagatacgaagtcctgtctttaacagtatcagcacatcatcataatacttgtgatacacattgtccgtcttgatgaatgagagtagggcttgttcctgttcctctgtcaatgcgactttctctttggtatcattttctaggacttcactcaacttgaaatcaaaagggtttttccttacgcagtcgtcttgtatggcgatatagaacgacgcttttaacgagcgtttatggttgttaatggtgttataggaaaagcctttatctttcatgcgtaatgcccattctttagcgtcagagggttttatcgtatcaatgctcctagcacctaacttgtcctctttcaataaccgcatgagctgttcccgttgtttctgtgtgcttttcttcacgtttgccctctgtacgttctgtttggcataaagttggcaaagcgtcattttcttgcctgtgctgtcgataccgtcctcaatatcccgtcttatctgctgttccagttcacgaagtgaggatttttcccgttttccctttggtgtcgggtctgtgggtgtcaatctccaagcatacacatattttgtgtttccaaatgcgtctacatatttatataagtattttccgtctgttcgttggctctctccagtatgcaggatacgacctttgctatcccgtcttttttctttcatggtgtctgctcctttccttgttggaaagagccttgatatgacttgtgttcatcataacacatacaaggctcatttgcattagattgcgtccaatttatcaataacctgttcaaactgtcggcgtttaatctgtatgcggttgccattcataatgagccagccagcgtccttgttttcctctgccaagcgtcttaacttgttttctccgatacggaaatactttgacgcttcttcaatggtaagggtgtatttttcccatacaggaatatcgttgttattcatcagatgccccctttcccatgtttcgtgtcatactggatataggggataaggtcggtgcggtctatcctctgtaagtgggcggttaatttactggaaagggaagtgctgtatcttgccttatcgagcatagttcccactttttccagtccgcctaatgcgtcatgttcttctaagaagtaaaaacttttgacagcggaaatcacgccaccctctgtaagccattgctgtgtttcctcaagggaattatgtagtttcggcacttgcagtttcaagacttccacagcccctaaaaagcgttcccaaaaccgacacgttttccatctgctcttattgctttcatttctgtttggcacgacaaagcgtaggttgtttgccaatagcccgaaagccagttccccaagttcaagtggtctgtctttgaatgtcatggcaaaaacatgagccttatcatcacgcagttgcatttctgtccgtttccaactgccgacttcatcaagcgtcttatcatgttttgaacagacttccttatccttatcataaaagcggtaggacaatcccgattttccagcaccgatataaacggtttttgcggtatcgaaatcgtcaaacttgctttcgtcgaagtggtagccctcactattcgagataaattcctctttttcgcattttttctttatctgctctatggtaaagaatggcttttcgttcttatcatcaatggcaatatcaagtcttgtgaaatggaagttatcccgtccgtatcttcgctcacaacgtcggaacatatctccaaaggtataattcctactgtcgagaatacggaaaatatcatcacaacctctgccagtcataacaagataacagcctagcccctgtgggttgtcctctgtctttcttgcgtcccccgatacataaatatctccaatctgccagcgtgcttgataagtcttgaattttatcgttgctggatacacattgaaaatatcagtcggtaaatctaaaatgtgcatgattacatcttcagcggttgcggtatcaaatacaatgctgatgtaatcaatcttaacggataaatttttgtgtgtagttatagtgcattgctcctttcgtatgccccgttttttgcggggtaaaaattgtgttttttcctttatttatcacagtttctaggtactatgacatgtatacgcagggcggtgttacatatacgccctttacgaacgcctaaaggcgttccctttcttcctgtgtctgccccgttcttaacgctcacgagccttgtaaggctcgtggctaaacggaacagccccagtcagaaaccttattttcggtctgatagtccatgcttattcatgctatcaaagtgaaaatatatattttatatgcttactcaagcgtgtgattgaccctagcgtgcttaatcactctgtctaatacgataataactccattagaattacttgtcaagaagtttttgttgacttttagatatagattaagtatgatatgcttataaataccaagaaaagcaacgaaaggagcgattatactaagttatggagcattatgaaaagaaaatcagtttcttaggagaaaacatacagaccataagaaaacacagaggaatgaaacaacaggaacttgcggacaaaatcggtatcaatatgcagagcctttccaagattgaacgtggcgtgaattatcctacctttgatacgttagagaagataatggacgtgctgggtgtaacgcccaatgaattattgtcgggagaatggaagtatattgaccacaccgagccctatatcatggatattatcaaacgggaacaagacttcaatgtttccttagattacctgtctgaaaatgaatttttcgatgatgaaaaagaatgcacattttacaaggcatataaactcatacagtatatccataactacattaccaatgaggttacggagttggaagaacttatggaaatcaagcagttgatacagcgtcaaaaactggaacgcatgataaaagtgcataaggaaatgcgagggttagaccgatacagagaacagcccaaagagtataaataccatgacccttatgatgattggatatttcgtcagcttgcggatatagacaacagaaacaacattcccgacacttctccacaagtagacttcaatgaagcagactatgaagattatctaaaggcgaaatggaacagaggtctttaatttcctcttgcatggaagatacagcaaacaaaaagcccagtaaagagtgcaaagcaccaccaatggtggcaaggctcttgacagggctttttcttttctgttgtggggtaatcaagaggaagaaagaaaaagtgtgcatttttgttccataaatgctaagggtatgctgatttttattgtggcggatatatggaactgttataatatggatatgaagaaagcgacaaatttgaaagtgttaataattttcaaacagcctcattgcatggaaataagaaacagactatccttaaagtaggaggtggcacaaatggcaaatgaagataaaaaagattttaatgctatgttgcatgatagtaaggatatgccaaaatttcaaattatcatagaccagaaaagtattgagaaatatggtggaaacaaaatgtattttgctcccccgattgactatgacaaagtaatgaaaaaagttccgtatggtaaagtgattacggttggaaaaatacgagaacactttgcaaaattgagtggtgcagattttacagagccgattacagcgggtatatttgtttctattgtagcgtgggcgagttatcagcgttccgaagatgaaacaccctattggagaacattaaaagcaaacggagaattaaatgctaaatatccaaatggtattgaagcacagaaagaaaaattagaagcagagggacataccattattcaaaaggggcgtaaaaatatacgatactatgtaaaggactatgaaaattctctttttgatttgaaataggcaaattctatttcacaatttcatatctctatacacaaagcagttagtcttaggattgactgcttttttcatacctaaatttcagattggagtgatgaaatggtgtttgttagagctgttcaataagattatcggtgcataaaattttattgtggtgcagatatgaaaatgatataatgtggatatgaagaaacggacaaattagaatttggagtgaaacagaatgattataataatcgaaaccgtaattttatgtatcgcgttttttctaatatgtttttggggaacaggtacagataacaaaaatttaaaaagctattcatcttatccagatgaagtgcaaaatcgaataaagagtattgcagaatatcaaggaaaatttaaggaaagcaataaagtggttacatttagccaaaataattcatatatatatatgttgacaacaagctgcttttgtatataatattatataaaagggggggaatgtttatgttacatagcatgcgtattcgataagcattgaaatcaaaaaagatttttcccattttcaatatgggcttttttgtcatgcttattttgcgtatgctatacaacaaaactaacgacgtatagacatagtataaaaactatgccttaattttgttgtagtattatatgtataaatgcaggtcaatgctcatgttgagaattgacctgcatttttttgcgcaaaaggagaaatattatgcttgaaaaatattggataaaatgtccaatttgtaacggaaagacgagggttcaagtattttataatacggtattaagaaattttcctcttttctgccctaaatgtaaattaacgcatatcgttgatgttgaaaaactagaaatcataatcaaaaactctgaaaaacaaactttttaattttgaaaaggaaggatatttaaatgaaacacttacctaaaagtacacctacggaaatattgaatgacccatacggatttacttacaaagaaatgtcggaagtaattggagaggataaagcaagagccttatatacggaattgtataaacagccatttcacaaagaaaatctatcaatatcaacaaaaaaagtctataaaagtagcgatactgaaaagtatgtttatgaattgaaagataacaggtatattgaaacggtttttattaaacggcgagatggtgggactgtttgcgtaagtacgcaagttggttgttctgttggctgtattttttgtgagtccggacgcaatggttttgttcgtaatctaacaccgtctgaaattgtgcagcaggttgtattgatacgtcaaaaagtaaatcgtatcgtttttatgggaatgggagaacctttattcaattacgacaacttgattgcagcaatccatattcttcgagatagaaatggacttaactttccaaccgacggcattaccgtatcaacagttggtccagttaatcaattaaaaaaattgcgcgaagaacatctaaaaattcagttgacaatatctttacatgcagcaacacaggctgcgagaaactgtatcattcctcatatgcacatgtacgctattgaagatgttgttaagcaagcattgtcctattctcaaaggcataatcgaaaagtggtatttgcgtatttgcttttaccaggtataaatgaccgttcctcagatataaggcaacttgcaaaatggtttaagggcaaaaatgttatgattaacgtgctgcaatacaacccgacgagtaattcaaaaattagagcaccacaaaaacaagaaatggttgcgttcaaacatcaattagagcaaacaggacttgaagttaccatgagagtttctcatggtagagagattaaagcagcttgtggacagttagctaatacatataataaagccaaaaaacaacagaaataatttaattaaaagagccagacgcacagacgcagagccgataatatgcagtttgaaatactgctgttatcggctcttttttgattttaatttgtgcccctaataaccatattggagcaaaatcagaactgttgcttgtcgttctttgatttccgcagcagctttgaaaaatcaaagccgccgtttctttttatcttctaatgaaatgacgcggtatcactgttaaaagcggcggctaaaggaggtagccgccatgaagcacataccctatcgacaaaatccgacggtcattgacacatcaaaaaaagcccgcccaccaccggggaaaattacgcttgtatatatgaactgtctaatcatctaaatactgcttacaatacctatgcgcctgtccgggcttttcggacgggcgcattttgctgctcaaaaaattttttgaagaaatttatatccaattttctgttatttctgttcgtactatttatattagggttgtttatcaaagaaaatggcttcacacataattttctttgtttaagtattataggacagggattgaatatctttgacttatttattgtagaccttttatggtggcggaatacaaagcgtgttcgtttaagaaaaatgccagaaaaggaattgtatcaaaatccgaaaaagcatatagaagcgtttatcagagcctttattatgtatctgctaattgctctgatagacggatatatattgacacttttataggaatagatataagtaaatcccagtttgacaatttcatatccatacacacaaagcagttagtcttaggattgactgctttttaaaaagacaccatttaggtgtaatgatgtcttttgggtgttattttataggtcatatcaaggctcattcaatcgtggtaaattcgtggtaaaatgagttttttctatacttcaaaatacttgaaagtatagtgtttatgcggataatcgaaaattagatataaaatttatattaaatgattgatatttccacctgtaatgtagtatatttaaagtgtagaagtctactttcggcctgaagtttccaaaaatgtcctggccctaagcagatgtcaccacatttgacacagaacaggaagtgatcctaatgaagatagaacgtatcaatgaaaaccagattcgctgtacattgaccagctttgatttaagtgcgcgcaacataaacctggtagagctggcttatggaacagaaaaagccaggaagctgttccgggagatgattcagaaagcatccaatgaagtgggctttgaggcggaggacattcctctgatggttgaggcgattccgctgtccagcgagagcattatgctggtcatcactaaaatcgaagatccggaagaactggatacccgttttgccaagttctcacctttcacggacgacaaccagaattcccttgtgtcgcagctggccagcgagttcctggagggtgctccggattccctgaactacctggagccaggttccgtggaacaggttggggatgagagcggtacggacggtgcctctgaagctcctgccaagaagaatacaggctccgtagccagcagccgcattttccgcttcaatagcctggaccgcataagcgaggcttcccgggccgtatccggaatctatgacggcgttaacacgctgtataagaagcccggaaccagacagtattatctcattgtaaaacgcctggactgcggggacctggatttctcccgcgtgtgcaacatattggcagagtatgccaccaagctgtcaggggaatctgccagcgaggcatattttaaggagcactacgaggtcatcattcaggataacgcccttcagaaccttgccaggatttaggagctaaacatatggaacgattgaaaacacccctgaggccgtatcgacccaggggtattattttgccttaaacgatttcatgctgattggaattagattccctgaaagcccggaacagttacttaaaatatgccgggtactggtctctgaacatctgctcgttcaacatccacctgttcagatggagatccattgtctctgcggccagctttttatcgcggctccgtattgcctccagcagttttttatggtcctcaattatcttatggtccttaaccgctgccacggacaggctgcggatcctgtcatagtgaatcgccagcctctggctcatctcataggtaagctctttgcggcagatggaaaacagcttccggtgcatctcattgtccagctccaaaagcttccgggatgaacctccctccagataaaactcctggagcctgatattctcatccagccactgcaggtcctcttcatccgcctgtccgcagaccagctcaacagccgccttttccaggaccaggcgcagaaagcgcgcctcctccaccagatccacatcaatcaacgcaatgcgcatccctctctgggggaatatctcaatgattctggattcctcgctgagctgtatgactgcctcccgcacgggtgtgcggctgatgccaatcatctgcgacatttccacatcgttaaagggcgctcccggttccaaatccagagatatgatgttctcccgcaaggtccggtacgcatactgtctggcagtctctccatgtctcttttcctctatcttcatgggtaaaacctcctaataccagttcccagggcctacagggactgtatctccttccagacatcatcatccacgtaaatccccagcctgtcatgctcctcatggaaccgggcgcttccctggcccggcgccctgacgctgccgccttcctccgacggggccgagctctttacatacaggacagctgtatccacgatttctttcatatgggcatccgtagtggtcctgccgggatccaccacaatcatgacctgggaacagcctccgcagctgccgtatcccttctggtccatgccggctgcccctataccgtccgtgagcacggaccccaggatatccagcataaacgaaaaggccgatcccttccaataacccacaggcagcacacggcgggactgctcgatggcgcccggatcgtccgtcagattgccctcatcatcaaatccgccgggatagggcagtttctccccggccagccgggtaacctgcagctttccgtaggaatactgggacatggccatgtccagctggagaggttctcctccgtccgcagacggcacagccatgacaaaggggttgttgcccagacggcattccctgcctccccatggcggcatacaggactctgtattggtccacataattgccgcatacccctttcttgcagcgtacagcccgtaggtgccgccccgcatccagtgggtggtattcctgattcccaccatgccgatgccgtactgatccgccagctccatggcccggtccgcgcagtacagggcgttcaggacgccgggccccatgtttccattataaacccgaagggcgccaaactcccgctccagggaaggctcagcatttacgtccacccagcctttctgaatgtaatttacaaacctggccacccggttggtgccgtgagaatataccccgtcgtaggtagtctccgtgtgaatacgggcgcaggtctccgccttttcctcagacatcccgtatttaaccagcaccctcttaatctcactcttaatttcatcaaaggttaatctcatggcacccatcctttccttctgtatgcgcctatcggttctgcttacagatagcctcccacagaccatttaagtagcatgcccccatggctctgtcataaagaccgtatcccggcatggacacctctccccagacagcccttccgtggtcagggcgcatgattccgtcaaagccaatgtcgtacagcgctttcattatctcatacatatccatgctgccgtctgctgagagatgggcagcttcctggaaatctccaggagcattatactgcagattgcgcacatgtgcaaagggaatccttccttttaaggaccggataatatccgggatgtcattttccggattgcttcccagggaaccggtgcacagggtaacgccgttaaagggcgagtccacggctttcatcagtttgagaagccgctctttgccggtgataatccgggccaacccgaatacgggccaggccgggtcatccggatgtatggccatcttaatatcatacgtttcgcatacgggctggattgccttaaggaaatacaccaggttgtcaaagaggcggtcctcatccacatccttatacatgtcaaacagctcttttatgcgcgccatacgctcaggctcccagccgggaagttcaaacccgttggacttttctcccatggactggaacatattttcagggttaatcttatcaatctccttctggttgtaagccagcaccgtggaaccgtccggacgctccttagccagatcggaacgtgtccagtcaaagaccggcatgaaattatagcacaccactgtaattccggcctgacccagacgctccagagtcgttatgtagttggcaatatactgctccctgtcaggagttcccaccttaatagcatcgtgtatattcacactctcaattcccaggacctttaatccgctggcttccacctgttccttcatctgaaggatacgctccataggccagacctccccggccggaatgtcatacagggtggtaatcacgcctttcacgcccggtatctgcctgatttgctccagagatacagaatccacaccctccccgaaccaacgcaatgtcatatccataactaatttcctccttaaatatatacagtactttgtgcttctccggttttccggaaataaatattttaatatactaatatattactctctcgataacactctgtcaatactggcaaacacaaaaaaacccggcccagtcatatatcccctgagccaggtccctccaatcactgtttcagattatcatcaggctttggctgacaaaatttcattaatctgagaaacaagtgtatcacagtctataccgtgtaccatacaggcctcttccagagactctccttgggatgccggtcagccaaggcaatgcattccggcacgcatcaggattggtgcaatgctgtcatctacctggatcaactgtccgatgagcatgtctttactaatttccattatcgtgtcctccttctatttctgctatcagtatacccaattattcggtttaccacgcttctaccatcataatacgtttttcgacattttacaagtccaacatggacttacatatttttcatattaaccataattatcaaggcttgttaaaaaatattatcactatgccctcttgacgtgtatacaatgtgcataatataataagtgttgcaaaagcaacagcatatatcgggtttttttagtagactatggatgtccggtaaaaccggtatggctgtgaaacatttggttaacaatagtttttatatataggttcacgcatttcacaggaggaaaagtctatgagaacagagtggaacacatttaaaggcggtgtatggcagcgggaaatcaatgtccgcgacttcattcagaaaaactacaccccctatgacggcagcgacgagtttctggaaggtcctacccggaatacaacggagctctggaaccaggtcatggagctgtcaaagaaggaacaggaagccggcggagtcctggatatggataccaaaatcatttccaccatcacgtcccacggcccaggatatttaaataaggacaaggaaactattgtaggctttcagaccgacaaaccatttaagcgttccctccagccttacggtggtatccgcatggctatgaaggcctgccaggacaatggatatgaggttgatcctgaaattgtggaattctttaccaagcacagaaaaacccataatgcaggtgtattcgacgcctacacccctgagatgagggcatgccgttccagccatatcatcacaggcctgccggatgcctatggacgcggacgcatcatcggtgattaccgcagaatcgccctttacggcgtggatgccctgattcaggagaaaaaggaagaaaaggattccacacgcaccattatgtactccgatgttatcagagagcgcgaggaactgtctgagcagatccgggcgctggaggatttaaaggagctcggaaatatctatggttttgatatctcaaagccggcttgcgatgtcagggaagccatccagtggacctacctgggctacctggccgctgtcaaagagcagaacggcgcagccatgtcgctgggacgcacctccaccttcctggatatttatgctgagcgcgatttaaaggaaggacgctatacagagaaagagattcaggaattcgtggaccacttcatcatgaagctgcgtcttgtaaagtttgccagaacgccggaatacaacgagctgttctccggagaccccacatgggttacggaatccatcggaggaattggcattgacggccgccacatggtgaccaagatgtccttccgttatctgcacacccttcagaacctgggcactgcccctgagccaaacctgaccgtactgtggtccacaaagcttcctgagaattttaaaaggttctgtgccaagacctccattgagtcctcctccatccagtatgagaacgacgatttaatgagggtgacccacggcgatgattatgccattgcctgctgcgtatccagcatgcgcatcggcaaggaaatgcagttctttggcgccagggccaatctggccaagtgcctgctctacgccatcaacggcggtgtggatgaaatcagcggaaagcaggtaggtcctaaataccgtcctgtgaccaccgagtatctggattttgacgacgtgatggacaagtacaaggatatgatgaaatggctggccaaggtatatgtcaacgccctgaacatcatacattacaatcacgacaaatacagctatgaaagactgcagatggcgctccacgacaaaaaggtgacccgctggttcgcaaccggcattgcaggcctctccgttgttgcagactccctgtccgccatcaaatatgccagggtcaaggcggtgcgcaacgataagggcattgtgactgattatattgtggaaggcaacttccctaaatatggaaataacgacgaccgggtagaccagctggcagcagacctggtgcacaccttcatgagctatataaagggcaaccacacctaccgcggcggtatccccaccacttccatcctcaccatcacctccaacgtggtgtacggaaataatacgggtgctaccccggacggcagaaaggccggacagccctttgcgccgggcgcaaaccccatgcatcacagagacagcagaggcgcagtggcatccctggcttccgtggcaaagcttccgttcagggacgcccaggacggtatctccaataccttctccatcataccgggcgctctgggcaaggatgaccagattttcatgggagacctggaagtggagctgaacggctgcggaggcggctgtgaagcacctaccctttttgaagggctggattccgaggccgatatcgaggaatcctgataagcagcatataaaccatttacttgagaaagagaggattcatattatggtaaaagcaagcgaatcacagattgataacctggtggctctgttagacggctatgcccaggaaggcggacaccatctgaatgtaaatgtattcagcaaggaaacccttttggacgcacaggcccaccctgaaaaatatccccagctcacggtcagggtttccggctatgcagtaaattttaataagctgacaaaggcgcagcaggatgaggtcatttcaagaaccttccacggatccatttaaatcctgtctgcaaactgctttggatgccgcctgacaggaagatgttccgcctcaggcggcatccatgtttctcagaaaggagcacagctttatgataggacgcgtacattccatagaaagctttggtaccgtggacggccccggtatccgcatggttatctttttaagcggatgtcccatgagatgtctctattgccataatccggatacatgggatcccaagggcggttctcccatgacagcggaggaaatactggaccagtatgagcaggcccgccctttttacaaaaaaggcggcatcacggtcagcggcggcgaaccgctgatgcagataggttttgtgacagagctctttgagaaggcaaaaaaaagcggtatccacacctgcctggacacctccggcatcacctttaacccgggctcccaggcggtcatggcccattttgaccggcttttggcttccacagatctgatacttctggatatcaagcatattgatccaaaggaacatgtgaaactctgtgcccagccccaggataatatactggctttcgccgcatacctggaaaagaagcagatacccgtatggatccgtcacgtggtggtgccgggcataacggaccgggaggaatatctgtaccgccttggacgctatctgggcacccttaaaaacgtaaaggcgctggatgttctgccatatcatgacatgggaaaagctaagtacggccagcttggaatcccctacccgttagaagacacagcccccttgcctcctgcaaaggcggcagagtcccgcaaaattattcttcagggaatgcgcgatgaaagggtccattgctcctaaatttatacaatattcgctggtttaggaacgattttcctcttgaataattagacgttatagtataaaataaaataacaatgtagacaaatcttaaggaggtattttatcatggcatatgtaatcagtgatgcttgtgtaagctgcggcagctgtgcagctgaatgtccagtaagtgcaatttccgagggagacagccagtacgttattgatgctgatacctgcatcgactgcggaacctgtgcagctacctgcccaaccggagctatttccgaaggctaattaagtattacataagggtctcttccagagggaaggggctctttttcatatattcagcatatattattcacagaatacatggaggaatccaaataccatgaaaaaaccagtaatcggcataaccccttcccataatacagataatgacgaaataagcgtacgccccacctacctgagggccattgaagcggcaggaggcctgtccatccttcttcccctggaagtatcagcggaagatttaaagcagctttccgggctttgcgacggttttctcttctccggcggtccggacattcatccgttcctgctgagggaggaaacacatatgcattgcggcaatgtgtccgtggcgcgggataccatggagctgtctcttctgaagctggccatggaagccaaaaaaccggtcctgggaatctgccgcggagcccaggtcatcaatgtaggcctgggaggcgacatctatcaggatattaccagccaggcagaaaccggctttcccattgcccataagcagccctattcatgctgcctgccctcacaccatgtggatgtacaaagggatacactgctgtgcgggattgctgatgggaaaacgcaaatcgaagtaaacagttcccatcatcaggccgtacgcaggattgccccctgcctcattgccagcggccatgcgcccgatggcatcatcgaggccctggagatgccggattatccctatcttctggcccttcagtggcatccggagtatatgtggaagacagatactgtgtccgccaatatatttaaaagctttgtggaggcctgcaggggatagctggaagagcggacagctggaaaggccggctgcagaaaaacagctacagaaaaacagctgcagaaaaacggctgcagtaaaacggctgcagaaaggccctatatgattcacgctgcaaatatatgcctgaatcatacagggccgtctcacttatctcctgtacttatctcctgtccttatcttctgtccttatctgcctactgcttattatctatcaattcaccagccatctgggccatatcctgggctgtcatgggattatccatggctgttatgatgtaaaccttctccccatccttccagagcatactctgggcaacctggtccgttaccgtatcgcttccataagagatatagagttctcctgctgcttcctttgccttctcctcttcggaggcctgataatccgggggaacaaaacggtactggtccctggtgtagtttagagtaatcccattatgttcaaatacctggtccggctgtccttcctcctcaaacaggcttgtgccctggactgtaacgaatatatccgggcttccgtcctttttgtaattcagagaaaagctttccgcggactttatcacatttccatcctcatccatggcgtcctgatgggtgggcattcccatgtcaaaccggtatccgttgctgaatacttcgggggcattggtggtatagcccagctttgtctccatttctcccagtttatcataggtaaaatcatccagatggctgcctccggcgcttgtataagcaaccttccctgctgcaaccgctgttatggtacccagtacgcagatggccgcagccaccacgaatacacgcttcatattccatttcttcattcctgtttcctcctctattttccggtgaacagagcgccgcattctctctgtatctgcggaagtcacctgtatggactctgcccggctgcatagggcacggcctatctgctcttccagttccttctgcgccaccggtttactccgtctgttcataaggttacctcccttcctaccctcttgcgttcttccatcaattcctgtttcagattcgcccgggccgtatacagcctggacttaacggttccttccagacagcccatgatgccggctatctccctggtggacatctggttaaaatagtacaggacaacggccgtcctctgtttgaccggaagattccttattgccttataaagctccttttcctgggagcgcatcatgacttcctccagcactgaggctgtttcaggctcttccttcccaaacacttcctccaccggctgttctttcctgttcttcctgcaataccgccaggcttccctggtaagggtcttataaagccagttcccaaaatattccggttctttgattttctttcggttcatccagcacagcacaaaagtttcctgtacaatatcctcactgtctgcatgacttccggatatgagatatgccatgcgcagtattttgggataataaaattccatcaaccggtcaaatgcctggctgtctccttccgccatgcggcgtaccagacctgccgtctcctgctccatgtccatccactccttccatcatctctcttatttggaaccacttatatatggaaccattatatatcccttttggcttaactgccagaaggtgttgttaatcggtgcacctgctatatagaggagggaggcgggcagacggttcattttatttgtaattattttttacatttgctctgtttttacttcatatcccaacaaacccccataaaagtaaggtttgtgcttgtcagaacagattatgtcatgtagaataatactgctgaaataaaagaatggcagtacctgtaaataaaggagttttcacaaaaggagtttgtaataatatgagcattttaaacgtagagcatttaagccacggtttcggggaccgtgctattttccaggatgtctccttccgcctgttaaagggtgagcacatcggcctgattggggctaacggcgaaggaaagtccacctttatgaacatcattaccggcaaactcatgcctgacgagggcaaggtggagtgggccaaaaacgtgagggtcggttatctggaccagcatgctgtgctggaaaagggcatgaccatccgtgatgtgttaaagaacgccttcgctttcctttttgagatggaagagcatatgaaccagatttgcgataagatgggggaggccggcgaggaagagatggccgccatgatggatgagctgggaaccatacaggaccttctcatggcccatgatttctatatcattgattccaaggtggaggaggtaggacgggcccttggcctggccgacataggactggacaaggatgtgacggagctctccggaggccagcgcaccaaggtactcttaggcaagcttctgttagagaagccggacattctgctattggacgagcctaccaactacctggatgtacagcatattgactggctgaaacgctacctgcaggagtatgaaaatgccttcatccttatctcccatgacattcccttcctcaacagtgtcatcaacctgatttaccatatggaaaaccagcgactggaccgctatgtgggcgattatgacaagttccaggaagtatacgcggtaaagaagtcccagctggaggccgcctataagcgccagcagcaggaaattgcggagctggaggatttcgtggccaggaacaaggccagggtggccaccaggaacatggccatgtcccgccagaaaaagctggataagatggatgtcattgaacttgccagggaaaagcccaagccggaattccatttcctggaagcccgcacgcccggtaaatatatttttgagacaaaggatttaatcatcggttatgacgagcctctgtcccgtcctctcaatctggtgatggagaggggccagaaaatcgtgctggtaggcgccaacggcatcggcaagacaactctgcttaagagcattctgggccttacacctgccctgagcggcagtgtggagctgggcgactacctgtccatcggttactttgagcaggaaatggcgcccggcaatacaaccacctgccttcaggaaatatggaccgaatttcccgcctatacacagtaccaggtccgctccgccctggcaaaatgcggcctgaccacggaacacatcgaaagccaggtcagggtgctcagcggaggcgagcaggccaaggtccggctctgtaaactgattaaccgggaatccaacgtgcttctgcttgacgagcccaccaaccacctggatgtggatgcaaaggatgaactgaaacaggcccttaaggaatatagaggcagtatccttttaatctgccatgaaccagagttttatgagggactggcaaccgatgtatgggactgtaaggaatgggcgctgaagctgtcctagcgtgtgtctgaaataaaaacaaaaagaaagccatgaaaccatgaaggcattttccgccccgccttcatagtttcatggccttttcttattcatcctcttttgaatccgtttcaggacttcttgtaaaataacgcagcagacaaagggaattagccgacagcccgttgccgaacagattaatataatcatcccgtgatgaacgcacatgatcaatgacggcctggcgcccgcgctcataatcctggtccttaatggcgtctatgatggcctgatgcttcatacatgctttactctgcagtgaattttccaaaaaagagagaaaccgcattctggtcagctgaagcagtatctcatcatgggcttttataagccgcttattgttggacagtgcaaccaattcattatgaaactgctgatcataaaaaaaatgttctttggcctgtccggcatcctttgtttctttcatcttatcggtgatttcctgaaggttttccagctgctcaggggtaatcccattacgccaggaaagcatgaaggcggtagtctcaatcccttcccgaaaatcaaagagatcctgtatatcttcttttgtaatggtagaaacacggtagttcttcttaccgatttgttcttccagcagtccctcatttttaaggcgcatgagtgcctgtctgatgggggtacggctcatattcagctccttgctgagaagatagtcggatacgatttgccccggaaacagatcgaaatcaaaaatctgctgccgtatggtttcataggctttatttgtcaagctgttgtctttttccatcatatcctcctgtgacaactacgtattaaaaccattctaatccatttttcttaaaaagtaaagttattaaaccgcgtgggaaggaacacgggagggggtgtgcaaaccgctgcacattttatgcaggtatgccgcgcatatttgtgtatcctccagcagaccatgctgtatattcccctccacagccacggttcccttgtatccgcactccatcagtttcctgtatatggcggtaaaatcaaggctgcccagacccggatacgcccggttatcatccgaaatatgcagatggggataataattcatatactctgaaagggaatctaccagcgatggttcttcaatattcatatggtatgtatctgccagaagctgtatgaacggacagtccagaaaattaatcacgtgtgccccttccttcagagtccttataatagatgcctccttgtgattggttgcctcaataaggacctgcactttcttttcttctatatatggctttaattccagcatggattccagaaaaagccgttctgaaacttcacggtcactgccggggcctccttttaagaaaccgattataattccgcaacccatggatgcagcataatcaatgttcctcttacaaccgttaacagccctcatcctttcctcaggaatacctgaactgagtgacagaccatgtgttttcgcatacactcccgttgccagcatgttcattttcatctgatattcatttaataatgactttagttcctctggttttattaaatccaaatcaggtaagtttaactcaaccccataaaagccttcccggtgcaaaaggccaaatagtcttctcagttggggaagctgctcctttgattccaggacacattgaaagccggtccgaaagggaaataatgaatgttccatacctagtcgattcctttccacacaaaataatcataattcattttagtttatctatagtttaaagcagaatacaaaatttgtatacaaaaaatgaatacaaaaaatggattcattttttgtgcacaattaccattgataaaaatataggcatttattacaataacaccatagagactactctaaaaaccaacaaaacatataattcgggaggctttccaaatgagaaaaatgatgaaacgtattgcagcagcaacaataggaatggcaattgtaatgacatcaaccgcttgctcctccggcaccggaagtaccacggcagctccggagaataaagagaccacggccgttcaatctgccgctgaagaaaagaaagaggacccagccgctgcaccggaagaaacctacactctgatgttcggacatgcccagacagaaacccatccatatcagacatgtttccaggaatgggctgatgcggtggcggagaaaacaaacggcggtcttgtgattgacctttatcccagcaatacccttggatccgaggaggatattattaattcatttaaggattcagacacaaactggggttacaacacagactttgccaggctgggtacctatgtgcctgagctggctatgtttaaccttccttattttgttgagaccatggacgatattaatgcagtaaaggaactggacatggtaaaagaatggattaataaactggaaacagagaacgatataaaggtggtatcccttaacctggtacagggttaccgaaatgtagtggcaggcaagccagtcctgaaacccgacgacttaaaaggactcaccttacgctgccccaacacggaaatctggcgggctgctgtcagctcactgggctgcagtgtacagggaatgggccgcggcgacatctataacaaccttgtgaataaggtaatcgacggctatgaggatgtttatccatgtattgtttctgaaagttattatgagataaagaatgtgaacacaatctccgaaacacataatattcttctgttaaatcctgtggtagttgacgccggctggttcaacagccttccaaaggaatatcaggatgccctgattgagacatgtgaccaggcatgcaattcctgttccgacaaaatgctgggcgaattcaccgaggaggcaaagcagaagtgtattgatgagggtatgactgtaattgaccattctgagattgacacagacgcattccgcgaggctgccaaggcgtcttacgaacagcttggcctgaccgatacctacaatgaaattatgagtgcacttggtaaataatcatcctgaaatgcagcttaatgaaaggtagaactgggaatgaaaaagttttttgagattctgaataaagcggagcttgcaattaccatgacctgtgttgtggggttcacatccgtgctgatgctgggagctgcggtacgcctgctgggacatccgctgaactggtgtaatgatgtggcactgctcatgttggcctggaccacctttctgggcggtgatgtggccttccgggcaggcagaatggtgaatgtggatatattgattgccaaactgccggtcaggttccaaaaggccgttgccgtcatggtatatgctgttttattggtaatgatgttcatgatggtaaaacaaggtgccctgctttgtgtgaatgtgggcaaaagaacgctggagggcattccctttctcagttacgtgtgggttgccgcctctattccggtaggtttctccctgatgtttataacggctgtcaaacgtctgtatgacctgatgatgtcatcagatacaaccgtcatttcaaaaatgtaaggagaacgacaatatgatatatgtttttatagtattccttattttcctggtaatgggtgtaccggttgcatttgcaatcggtgcgtccggtatggtattcttcctgttaaacacccattttccgctgacacacattgcgcagctgcctttaacccaggtccagagcatttccatgcttgccatccccctgttcatcctggccggcaaccttatgaataacggaggggttacaaaacgccttgtcagtcttgccacccttttaaccggacatatgaggggcgggcttgctcagaccagcgtggtcttaagcactctgatgggcggtgtatctggttccgctacggcagatgcagccatggaggcccggcttctggggcctgacatgattaaaagcggatattccaaggggttctctgcaaatgtccttacattcacctcactgattactgccacgattcctccgggggtgggtcttatcatatacggcactacaggcagtgtctccatcggaaagcttttttcagcaggtatctttgtgggcttatatatgatgattgttcttatggtatctgtggcagtcattgcccggatgcgtggttataaaccggtaaggcagaaccgggccacatggaaggaaatcggtatcaatctaaaggaaacggtttgggctgtcatgtttccggtcatccttttagttggtatcaggatgggattcttttccccatctgaagttggggcctttgcctgcttctattctgtatttgtaggcgcctttatctataaggagctgaccatcaaatcctttataaccgctttaagagacagcatcgcggatatcggttctattatgatgattgtttctctgacagcattgtttggctacggcatacccattgataagatacctcagaaaatgaccacatttattaccggcatcaccaccaatccctccctggtgctaatccttattattatccttctggtatttgtggggatgtttatggaaggttccgtggtgatactgcttctgacaccaatccttcttcctatgtgccagtctgtgggaattgacccggtgcaccttggacttctcatgtgtgtcattgtaaccatgggagtaaacacaccgcctgtgggtatgagtatgtatacggttaatacaatcctggattgttccctgcaggagtatactaaatccatgattccattcctggctgcaattcttttagccattgggttgcttgcatttttgccggatgttgttttatttctgcctcgcctgttgtattaaaatggtttaaaacagaaaggaatgtatttgcatgaaaaatataagggattgttttgttttaaacaatggggttaagattccttgtgtgggctacggcacatggagaaccccggatggcattgatacggttcaggctgtcagggaagcaattggctgcggataccggcatattgatacagcccagctttatggaaatgaagaaagcgtcggaaagggtattaaggaatccggtcttaacagaagcgagctgtttgtcaccacgaagctgaagaatacggaccagggctacgacagtaccctcagggcattcgagggaagcatgaagcgcctgggattggattaccttgatctatatttaatccactggcctgtaccggctgtctttaaggatgactggaaacaggtcagcagggacacatggcgggcctttgaacgcctgtatggggaaggattggtccgttccatcgggctgagtaatttcctgccccaccatatagacaatattgaggtttcagcccatataaagccaagtgtggaccagctggaaatccatcctttcttcacgcagaaagaaaccgctgcctactgccgcagaaaaggtatacaggttcaggcatggagccctctgggccatggaaccatcctggataatcctgttataaaggaaatcggactgaggtatcataagactgccgcgcagacagctctgcggtgggagctccagcaggatatcctgccgattcccaagtctctgaatccggaaagaatggcccagaacgcagatatattcgattttaacctgacacaggaggaatgcctgcggataacaggacttggagaaacaggaaggactggtcctgatcctgacaacattgatttttgatatgaaggttatggtttttacataatctctgcaagtatattagaaacaactccaaaagactggtattagcatgttttacactgcttttaccagtcttttaaattttaacaccaccactgaagatattcctagaattctctctttacctggctgtataaacagtaatatttactgtacggcaggatagacgtctgtatctctaactgatactatacctgaaactactcaaataacacttttaacagggtttacataacacatccccacattcaggccccatttcctcccattcgcggacaaattccacacatctctccattcaatgctataatggaaccatcagtactgagtacagcggcataccgggaaaccgcaccattctcactgaaaggagctgcacccatgaaccttagctggaaaaccattttaaaaaaggcaggtatcatcctgctgtccacactgctcttcgccctctgctccggccttctctacattacaaagatggccggctccatcaatattacccggccggaggatgaaccagagctggcctccgccatgaccaatgaaaacctggacacagagacccaggaaaagctgggcggatattggaccattgctgtctttggcgtggacagccgcaacggaaaactcggaaaagaaaataatgccgatgtacagatgctgtgctccatcaacagagatactggtgaaatacgccttgtatcattataccgcgacacatttctgatgaatgacaccgcaaacagcggatatggaaaactgaaccaatcctactttctccagggcccatccggcaatatctctgccattaacacaaacctggatatgaaggtggaggatttcgtgtcctttaactggaacagcgcagcggatgccatcaaccttctgggaggcgtggacatagaactgtccaaggcggagttctattatatcaatgcttttatcacggaaacagtgaacatcacaggaatcccctccacccatctggaaggacccggcatgcagcacctggacggcgttcaggctgttgcctatatgcgcctgaggcagatggacacagactttaagaggaccgagcggcagcgttctgttattgagcaggtatttgacaacgccaggaaggcagatatttccaccctgattcaggtattccatacagtggcgcctcaaatcatgaccagcataagcgaggaagagtttatggatattgcatataatataaaaaactatcacataaacggtacggccggatttccttttgaacagaccaccgcaagcctgggaaagataggcagcgtggtcattcccagcaccctggaatccaatgtagaagaattgcaccgtttcctgtatgacgatgatgcctacacctgctccggtccggtccgggacatcagcagagaaatcataaaaagggctgttaaaaattaaggagttatgagtatgatacgaattgctgtctgtgacgatgaaccctgctttacacagcagattagccatgtcatcgcaaaccatgccagggacatatccccgtccccggaaacagtgctttacaccagcagcggccagctgctttacgatgtggaggagggcgcccactttgaccttctgctgctggatattgaaatgcctgaaaaggacggaatgagcctggccgcgtccctgcgccgccatcttcccttgtccctgattattttcatcacctcccacacccagtacgcggtaaaggcatatgaactgtctgttttccgctacatccccaagtccgagatggaaacctgcctgcctctggcacttaaggatgccagccgcattctgaaacaaagctcttcagatacctatattatcgaatcagccagaaggattcagaaactgtccgcggaggatatcatctatgtttataagcagcagaaatactctgtcatagccgcaaaaggcgcagagattcctgtgcgcaagcccctggcccaggtgctggaggagctgaacaccttaacagacggaggcaccggcagttttctcttggtggagcggggatatatcgtgaacctgttccatgtggaaaaactggaggacgagcagatttacctggacaatggctctgtccttccggtcagccggaaccgccttaaggaaacccgtgaagctataacaaggtattggaggaaaatgctatgactatgaaccactggtatcagtccatgtaccagatgtttgaacttgtttcagacttcattgaagcgtggctctgctatggctttgtggggctgttcctgccggaccgggtcaggggaaaggtgctgttttttattctgtccctggtgctggtgggttctgtccgggccatggatatactgggcatagaccctataatatccactctttggtttgtattttatatctgtatgaccacggtggtactgttccaggtgaatctgttttatgcggtgtcccttgttagcttttatattctgtgcctgtacgtgatcaattatttctgcatgtccgtcatgggggtcattgccggcaaccgccagtttgcgcagtttatcctgaaccagctgtctctgctgcggtgtatttacctggctgcggataccgctcttttgtttttgttatatatgcttatcagacgcgcctttaagggggggctgctctacagcccgcggatgctgttcaccatttcccttctgggcattctgggcattaccttcctgtcagtggtcacccttcaggatatttccgtgattaccctgttcagctggagcctgtgccttgtcatggtgctgtgctttatttttctcctgctcttttattccaattacatgaaggaacatgagctcagaaatattcttgaactgaaggaccagatggtgcgccaggaatacgagatggtcaggcagcttcaacaggaacagcagtccctttcccatgacctgaagaaccaccttttagtcatggacaccctgctgaaggaaggaaaataccaggaggcccggaattatatcggccagctgggcattcccctggagcgcctggcaccctccatatggaccggcacctccaccctggatgtgcttttaaaccataccagaaaccgctgcatccagtctcatataacatttacggtacaggccgacgccgttgatttgcgccccatggaggaccaggatatatgcagtctctttgccaacctcctggacaatgcctatgaagccgcccattccatgcccgatggacagggctggattctctttaagatgagaaaggccagggaaatgctcttcttagatatttccaactcatcgcccgcacccccctgtgtcaaaaacggcgccctgatctcacgcaaacaggatggacggcttcacggtcttggacttaacagggcatctgccactgcgcaggaatacggcggccagcttacctatggatatgaaggcggtgtgttcacggtcagcataagtttcctggcaggagttaagggaaggggtttagaagagagaggttagaagagatggattagaagagatgggttaaaaaacagaatttccagaaaaggtcaaataaaaaatgaccctatttatataaggccattttttactctacaggtcgattctgaaatcgtctgaaccctcgccgtttaccacataataggctgcattctgttccggtgatatgtacagctccatagacttgattacggttcccggatgagtcttcgcatatgccttctccgcctgcgccagcacatcctttgcagctacctgcctgccgccgaactccactacaacactcttctcaatctccggttttacagtctctttcactgcttctttaaccacgggctcatctgcctttttaacatcttctgctgtcttaacctctgctgtactcttaacctctgctgccttcttaacctctgctgtcctggtctgcgcggcgcctgtctgcgctgccgctgccgcagtcctctttggtcttgccatgttagttcctccctaatttcaatccgatttccagtgtcaatggggattatacggcagtcacctttttttgtcaatgtcgcggatatggaaaataaaccgctaaacaaagacctttatggaaattttttgaacatatactgacacattgtcatatttctttatggcatttgtcacattccgattgggaaatcagtttccgggccctgtccgggaaccaggcaaaggctcctgatgacggaaccatggaaaattccatgatttttccggtggacggatgtggaaatgccaaccggcgggcacacagggccagaggccggtgtgcatccccaaagctgctttttttccttcctctgtccacagtcatggttgtggattttgtggataacccgcctccgtatcgttcatctccatacaagggagttgcatgtccggcaaattgcacccttatctggtggtgccttcctgtaagcagctctatatctattagggataatatctgctcctggtttttggggttgttgataacttccagaaccctgtaattaagaactgcttttttgctgttttcgtcggacttatccacaatctttgatgtgttgttttccttgcagtggcgcagataatccacatatgtcccctgtttatccacaggttttccacaaaccactgccaagtatgatttttttatttttccggcctgcaaagcggcgcttaatgatgctgcggatttctggttcagtgcgtataccatgattccctccaccggcttatccagtctgtggataacccccacataaggcggctgggctgtggatactccctgtggatggttgtggatatcctgtggattatgtagataacggcgtatctcacttaccatatcaggcgcaaagcctcttgacacctgggactccaatcccgcgggtttttgcactactataatatctttatcttcatataatattggtaccatacctcgacctcgcttatctgtctgtctcctgtacagacgattctaaaggaacgcttttgattataccatagttttgcctctgcccggttgattatattcagaaattagttttgcattcaaagtaattcttaaaaagtattgcatatttttggtcttaggtgtatagtatataatacaaacatatgtagtattcaaaactacatcgcagggttttgattaaactgtactgtgtttttaataaaaggaggctggatactatgacagcaaaattaaaacgcgggattaccaaggttaaggatcccggcagcgcattgacccatttcattgctatgattctggctatcatcgcagccataccgctgctctcaaaggcaggacatgactccggacatatgcgcatcagcgcactggcaattttcattctgagcatgattggcctttatgcagccagcacgatataccataccctggatatctcccctaagattaataagctgctgcgcaagatagaccatatgatgatttttattttgatagcaggcacttatacgcctgtatgcatgattgtgctgggcgataaaaccggctggaccatgctgaccctggtgtggggcattgccattgtgggtatccttatcaacgctctgtggattacatgccccaagtggttttcatccctgatttacattgccatgggatgggtgtgcatactggctataaccaaaatattgagctccatgcccagggcaggcttcatgtggcttctggcaggcggtatcatctatacagcgggcggtattatttatgccatgaagcttccgttcttcaactcccgccacagatattttggttcccatgagattttccatctctttgttatgggcggaagcctctgccactatgtgatgatgtaccgctttgtggcataaggtttaattgagtataaatacagagaacactgcttctgatatgaaatcaatgatttcataccgcaagcagtgttcttttctcttatatgcagtttcggcagcagtctcaaggtcagcttgtcctctggaaacctgttttctttatcagatgttccttctctgccctgctcatatgtttaatggcatattccctgctcatggcttcctgttttgtctcaaatgcctcataataggacagcaccaccggacgtctgggtttggtatacttggcccctttaccctggttatggaccttcagacgcttgtccaggtcattggtccagccgcagtaaaacgtgccgtccgcacaggtgaggatataggtataattcatggatatccttcctttccggtaaataaactcctgacagcaataaaagggcgtccctttaagggagtgcccttcctgtttcattttatcagataatgccggctatgtaaacggtaataacgcttgcaacacgtcatcaccgcccaggttgccctgtaatctatgattaaagcaccagctggatgcgcggcacaaccagatagaaggtatttttctgaatcacatctataccttattatatcgcgcatacccttaaaatgtgcataaaacacatttaatattcctctaaaatcttctgcctccgcctccgtggctcctgccgctgctggaccggtgggtggaacttcgccctgagcttcgtcctgaacccccggatgaatgattctgtgtgggccttggtataggggccgatgtaacaaatttgcgaatcagattatctcctgcgtccccaaaggcaaatttggcatctgcccggtaggccaaaaggctgttggctctctcccgcccggtgggctccatggaataacgccgcttcactcccatgcacaccgagcctgccaccccggctgacaccaggaatgcaaacactccctcgtaccagcgtatgcttctgtagatactgatttcccctgtttccgtgtcgtaattatactgtcccctttgtattcccctgtccacataatactccacatccttcaggaattcagctgccgcccctgcataatcacgggttttcagggaataagccacatcatcctgtatctgttcgattcgctggtctgtgagaatccgtatcatattaccggtggtggatacatagccctcacctccatagctgccgggtctgtccatataaatgagaaacagcacaccgctggcttttctgcccgttcccagtccgttctggtcgtaaaaatcatctgcatattcactggccgtatggctgccgtcattataagcagtgaccaccgccacatccatcccggtctttttcctgcaccgggcaatcagctcctccagctttcctgcttcctctgatgttatgagatccgcttcatcgaacagcctccgggcctccttatggttctggtccttttcataattcttgtccttttcataattcttgtccttattataggcctgagtcttgccatatgccccggattcctgtgcctgggaatccagtatgctgcctgccccgctccagactcccaggcacaccacggctgccgaaatcgccaggaacctgatccatctaaccattctgcgtcctgtcatcctaagaaataccctcctgtcataagtaataaaaacagcggaaggaacacagagaaaaagagaattataatcttcttcctgtccacaggcagctttccgcagatttttccggtctgcccgttgagagcgaaatagtatatcttttccctggccttgtcattatatgtaagggtccatacaggaagcagggcataactccacttctcatcccgtatgcctgcttcctttttgcgtacctgcatactgctgtagctcccggcctggtcctggaggctttgaagggcaaactgcctgacctctgtctgcacgtccagcacaaactgttctttttccatatcccggttctcggccaggaatccggaaagataacccatggagaaatcctctttttcattcatcctgtatggaagcacactgtctaccagctgccggttggcctttctcaggccatttctggccacatggtccacctccatggttccctggcgttttacgtcgtataccgttgtctccgtatacctcatgcctgcggtatcccacgtcctgagcctggtcccctgggcgtccagctccccgtccacccggcagctgtaaagccaatacgggaaataaaccccgctcatactctcaatctgttttttattgtaaaatgtctccggcacatacttttttcttcctatccactgggaaaaaatctcctccgccttctgcctgtctatctggaagggtattacataatccggtctgaactgcccttccagccgtcctgccagcaccaccggattatggcagtaatagcagaaagtcgctgcagtggtttcgtccgtcacaatctgggctccgcagctggggcaggtataaagaaccggctgtgccccagcactgcccggttcccggcgctcctgttcccggctgtcctgtccctggagtcccggttcctggtgttccgctttcctgcgcaccagttcctgactcagacattccagttcctcctgggtaaaatcagacaggcagtattcgcagtggtatttctgtgaagacgggtcaaatacaaggcctccgtcacagttggggcatttgtaggttatggctgccatattctctctctcctgtaatcacagcatttagggccttggtttcccgcaatcgctgcagaattttcccgtattgatgtttccgcaggcacaggtccacggtgtatcgggacggggatggccgcactcgccgcagaacttacccgtattagaggtcccgcagccggggcaggtccatgcgctgcccggctgtgttccgggcatctgaccggccattcccgcgctgcccggctgcgttccggccatctggttgggcacagcccactggcttccggccggctggacgcccactggctggctggccatcggctgacctcccgccggctgacctcccatcggctgacttcccatcggctgacttcccatcggctgacctcccatcggctgacttcccatcggctgacttcccatcggctgacctcccgccggctggcctcccatcggctgattgcccgctggctgacctcccatcggatggcctcccatccccggcattccggtatttccgggcatctggcccggggcctggttcatctgcatctgctgcatgttggtgttggatgccgcgcccatgaagccgccgcccatctgcattcccatccccatgcccataaaaccggccatggctccgctgtcgttggaacctgcatttttaagcccctccgcaatggtagtctgcacatacccctccctgattgacggatcactcatcatagcgccccggttcctcaggttaatcaggttctgggattcctcatcgtaggtaatgctggcaatacccactgcctgtatctccatgccccgcatccgggtccattcctcatccagcgtctgggccatatactgtcccagctcccggctcctggatgtgacgtaggatatcctggtgccgtctgctgacatctggttgatggatgtctgcaaagcctccaggaactccgacaggtactgctcattgatggagtctatttccacatggtctgcattctttggaatgacctcagcgtaaaatttaatggggtctgtcactttgatggaatacgttccatgggccctcaggaacaactctgcattgtaaaagttgtcaaaataattcactgggttgcgggtgccgaatttaattccctttatctcctgaaggttgacataatataccttctgagcccccggtgtcacgccaccgaaacggatacggttaaatgactccttcaaagcctctccaaactgcccgttaaacatggagggcatggaggaatggctgaccttgtagtagccttcctccgccgtataatccactatttttccgccgtccaccagcatcataaactggttgggatacacatggatgacagaaccgtctgacacaatatcagatgaaccctttgtattagatccctttcccctgcgcacctggacgccccggacaaagacggttctgtcccccatatcatccggctctacggcctccagccactggtctgccagggctcctcccactgctgtggtaactgctttaatgattcccatgattaatcccctttcttagctgccttcttctgtctgcgcctgcgcttaaccggctccactgccttgatggccacccaaatcataagcgctgctatggacagctgaatcacaatgctgatgataatccagttctccatcacaaaaccagtggactgcataccaaaatatcccgccatcttggctgtgggcgcgctgcctcccatctgtccgtttatgattgtataaaatgtagccgcaggattaataagcagcagataaatcacatttcctgatgatggtttgaccacattttccccgaacccataagccaccactgaattatttatattcatggaggacagggagagcgaaaacttatttatgaagtatgtcccggccaccacggctatcagcactccgtaggtaactaccgtggatatggttgaccgcttgaacagggctgaaaaacagattcccaggcttcccgcaaaaaaggccactgttatatagcacataagaagggacaggatgtcctgccaggtgattcctccatagacaaataccatggccactgccgggaaactggacacaatcagcaaaagcagcgtgctcagcgcgctcatcagcttcccaattaccacctgtgacgccgtcatctgggtggtgagcatcagttccagagtctgcctctcccgctccccgcttatgctggccgctgtcacggccggcactatgaacatcagcagtataaactcaatggtggtgacaaactcatacatatccataaagctgctgtactggataactgctgtggactctacctgggccacagcggaatacatgttgagcagtgtgaccatggacaggattccgttgaacagcacgataatgaggggcagccggatacttctggaactgaccttcatctcccggctatagaccggattttgcatcataagacaacaccaccctttcctcttcatgttctgtcagctgcataaatacggattccaggcttcccttttcccgggtgaatccgttaaccagcacatcgctgtcaatgagctgctggagcagcagggcctcgtcctgggcatcacctgcaaaccgtacgcatatatcctgctcccgcagggatatggtctgcacgcagggatggctcttaagaatggacagcgccttgtctatgttggtgaacacagatataaccagcgggttggaggtattgaccctggacaggatatcgtctatatttccctccagcaccatccttccctggtctatgattcctatatccgtacagagctcggacagctcagacaagacatgggaactgattactatggttttgcccgactcctggagctcttttaatatctccctgaactcaaaacgggtcctgggatccaggcctgaagtgggttcatccagtataaggatggccggatcgtgaatcagggccctggccaggcacagcctctgcttcatacccctggacagtccgtccacaaagaaatccagcttatcctccagccccacctgctccagcagggccgtatatcgtttccttgccaccagaccgtttatgtggtggcaggccgcaaaaaattccatgtattccgacacggtcaggttatcgtaaaccccgaaaaaatcaggtacatagccaatcatggatttgagctttcccaggtcaaaacgggcgttcatgccgtttatggtaatcctgccttcctctgcctccaggagtcctgtcatgattttaatggtagtggtctttccggctccgttgggccccacaaacccatagagggcgccggtctccaccgtcatgtccaggccgcttaatgcgtggtattttccgtatatcttgtgtaatcctcttatctccagcattatttactccttcctgtgacagtcagtatgggcagcatgatattccaggtgtaatcgcctgtggcatcgtacacatacttgatggtcagggtgttgcccggagacaggtatggctccagatcttccctgtcataggactggacatgggtatccatggaatcataagtgccggtattgtaattatagaaatacatattgccggcaaagggcaccgtgtaataataccgcatgctctgcaccacctcatcgctcatctggtggaaggacagcttctccacctcgatgtcatttcccagataatactctaacataaccggagtcaggccgtacatgctgttgttggactcgtaatactcgccggacagcacattgggctgcttctggagcgcggacctgtatatcatgccatcctgttcatagttgacatcaatagaggatgtaagcagggtggaaccatacgtctcataattggaggactttaaaaattctgtctcctccttctcattgctgaatcccagtaccctggcctctgaatggtagcctgacagatagctgcccatatagaaggacaggaggttggtcctctccaatgcctgcacataagccgcatcccgtatatccttatcctccttatagcgggaagcccctgtaatctgctctgccatggcatagccgaaattagtgattccgtatatgaccttcatgccgtccaggcttacagtctcacccggctccatgtggccaatgagaatcatctgattatacagaagtatggccacattgtccacttcctggctgtagttgttggtcagggttcccgtcaccttaccgtcaaaggaatttacatcgcctgtaaatccctcctgctgtccgttttccgtgcgacgctccatcataaagaacttggagttgaacgcgcccacattgtcggacctgagcctggttccctcctcgccgtaatgtatggttatggacggcgtctcctcacccgtaaatttgggcaggggccccatattgtagtaagcgcttcccgtaatggggtacagggtgtattccggattcaaagttacggagtacggtttattatagggagcccgcatgttgatgaatgtggtttccgaaatctcatccctgtccgtatcctttatggttgcataggtaaagaaggggcctgtgaacctggtgctcatccccatgagaaggaccatgccggtacagcacagagacagaatccccacagacagctggtaatactggcgcatccccctctgtttccagaagaagtagaggccgggtccggccagggccacataggccactgccagggtcacatacagccccacctttggaaggttattgatgttgcctgtattaatcagtccctggactgaccagaactggctggatgtgctgccgtccatggcgctggccagcccgtttatcttatcttcacccagaagggtggtaaacagattgtcaatataagagatattggcctggcagaattcctctatgtccacgaaatcatacatggccacggctaccagtccgctgccagctgaaaccgatgagaggacggacagctcatcgctgcccagcacctcggtgccgcctttcagcatgacatccgtgcaaaccagggggatggaggcgccttccggccggtccaccgcgtattccacacccatgttgatgacccgttcatccggttggggaagaggctgctccagaagttcctttccaaagcccctcagggtatcctctcctctttccccggttcctatgagcagaacgccgcctttgcggacccactcccacacagcctctatctgctgacctgacagttttccggaatcaaaatccgttatcagcagcacatccagctggtccagtcccagttccgatgccggcagagtggatgccgtcatctcgatggtcttggttctgagggtactgtagttaatgcccacgccgttaaaatacagaagctccgccggactgtcactgagcacaccgataaaaagctctgctgtctccaggttcaggttcagcttcaggcgtttgcttaccacctcattcccattctcatccagcaggcgtacatacatctggtccacccttgcccccagcgatatgctcactgatttgttcacgtttccgccgggttcaatttcaaccggatactcataccggtatacatcataatccaggttcatgttatatccctggaagtccgactccatggccagaatacacagggttccattaaacacctggccggactggctggacagctcgattttaaggggcaggaaacggccgcttttcgcagtattctggtaaccgtagaccacgtccatggccaccggtgattccacggtttcctccttggcagccgtgctgtccgtccccaaggcctgggctcccagggactggaccgtgacagacgctgccagcattaagccaaaaagggtgcttttcagcgccctttttattttctctggaaatatccgcatgttacacttcctcatcctatattctccgttcaagtcagctaatggttccaaaattctctttattgatgtcaaaattcacctgaagctttaccgtgaacacggtgccgtccaaatcgctggtcacattgatggttcccccgtgcatgtccactatttcctttgcaatggcaagtcccaggcccgtgccccccgtactgctggaacgggactgttccacccggtaaaacttgttgaatatcagaggcagctcctccggcggtatgacataaccgtaatttgtaatggagaccgtcaccacatcctcctgggccagtatctttaccaggactctttttccgtcggcgccatacttgatggcattgccaatcaggttatcgaacagacgggcaagcagattgccgtcagctgttatgatttttaccggtacattgctctgcagatcatatgacaggttcttttccacaaagttcgggtatgcctcctccagaagctgtcccagcagttttaccacatccagctgggatacatgcatggatatcctgccataattgagcttggtaaacccaaacagatcttcaatcagcttttccagtcgccgcgcctttccatatgcaatctctatgtacttgtgctgcatctgcgccggtatcttactgttgccggccaacagctccaggtatccgatgatggatgtaaggggtgtgcgcaggtcgtgggccacattggttatgagctcgtttttggtgcgctccgattccctctccttatccatcagttcccgtatatcctccaccatcttgttaaggttggcagccatactggagaactcgtcatccccaatcacatcaatggtggtgttcagattgccttctgatatgctctgaaccgcatctgatatattgctgatatagcggatatagggttcctgcagaatcataaacgttaccgcgaacagcaccagcccggataccacatagaccagcaccaccgccacatggtaatccagcacagcctgaagcaggcggttcatacgtccggactcttccatgtatctggcgatcatggacacgttggtcaccagaaatatttccaccagacaggaaatgacagcgctgtacagaatgttggtaacaacccgggtatggtagcgcctgctcatatcacttttcaattttgtaacctactccccacactgtggtgatgattttattctgtctggtgtcctctttcatcttacctctcaggcgtctgatatgtaccatgaccgtattgttggcctcatataccttttcattccacaccttctcgaatatctcgtcggtgctgaataccttgcccgggttggaagccagcaggtacaggatatcaaactcaatgggggtgagcttgatttcctcatcgtccacgattactttatgattatccttattaatggtcattcccttaatggtaatctcgttattggccttttccttggaagcgctgtttgggtttaactgggtgtaacggcgcagctgtgatttgaccctggctgtcagttccagcgggttaaagggtttcaccacataatcgtccgcccctgtccccagacctaatatcttgtctaaatccgtggacttggcgctgagcatgataatcggaatgttgttggtttcccttatcttcttgcacatctccaggccgttcatccccggcatcataatgtccaacagtaccaggtgtacctcttctttggaaataatttccagccccttggcagcattctccgccttaaacactttataaccgtcacttacaagataaatctcaatcaaatccgcaatctctttttcatcatctactaccaggatatttatatcgggcatgatgtcccctcctcatatgttaacttatatgacctattctaacataatatatcaaggttttccttacttttttcttgaaatattgtgggaatttctgttacaatgcaccggacctccctataatggtaatatcttctttcatttgtatacattaaataaaaatagactgaaaaatagatttttttgcaaatatttgtgttctgtcacaatagaaaaagaagtagattatgatataattatttcataaatattataaaaattttataaacttttaggaggtgaggatcatcaagatagtgactgtcatggacaatctggccggagagcaaaaagccatgaaggcagaacacggattgtccttttatgtggaaacaggagatatgcgcatcctctttgatttcggagcaggcaggcacgccctggaaaatgccctgaggctgggaatccggccggaacaggccgacattgcagtgggaagccacgggcactatgaccatgctgcgggttacagggattttgtggcggcaggtctcagctgtcccctggttacgggaaacgggttttttgaagaaaagtatgcaaggaacggcctgaaggcaacctatctgggaactggttttgacagcctgtttctggaggagcacggtatccggcatatggtgtgcgattctgtccttcccattggcaaggactgctgggttatgggcggtataacacggtcccatgactttgagacggtcccggaacgttttgtgatacgggacaaagacgggtggaagcaggattattttcaggatgaggtctgtcttgtactggaggacaaaggtgaactggtggtaatcgtgggctgcagccatccgggcatactcaacatcctggatacagtaagtaagcgcttttcccagcccatacgtgccgtggtgggagggacccacctggtggaggctgaccgggagcgcatacatatgaccctgcgtaccatgaaggacctgggcatcggacttctgggctttaaccactgctccggggaacttctgcaaagcatgatggctgaacatccggaactgaacaccgtgtatctgggcgctggcgactgcctgttcctctgatacccgctgcacttttaatttctttgataccatcgggaatgtatctcacagcaggaggaatgtatgctagaattttccagtatggcacaggatttcgtggaggccacatcctccctggtgggaggacgcaccatcaatatcatggaccgggaaggtactattatcgcctccacggaacaggaacgcatcggtaccttccaccagggcgcggctgaggtcattgccacgggaaaaccggttcttattgagacaaaggatctgccccggtatcccggcgcaaaggagggctataacatgcccatctttctgaaggacgaactgattggagtggtgggcatcttcggatgtgaggagcagatgctgaacgtggccaatcttctgaaggtctatgtgacacagcattttgcccagcaggccatggcccagaaacagaacgtggaatctgaggtcagaaaccgccttctgagcctgctgcttctgggagacatcgggcagatggaaaccatttaccagctgtccgccctgattccggtccagctggcatttcctgtaaaggtcattatgatacgggcaggcaagcggaaaaataccagggagcagatgaaccattacacccagctcttccagaacatgatgtggcagggcaccctggaccgctcaagagatgtgttcggcatccagaacaatgactgcatcatcattcacagtgctcccagacatgggaaagcggacgaagatctggacaaaatcatagcccaggtggtccgggaggaggggctctgtattgctgtcagcggcgcctgcccacggctggaggacattccgggcggtatgaaggaatccaacaccctgatttccatggagggcgggccggtccgtaatctggaggacagtcaggtcaaaattcagtatctgatttacaagtccctgattcacggcggtacgaagtacgcggaaatgctgtaccggaaactgacagccagccaggatgccaggcaggccgaggtccttctggtgactgccagggtatattaccaggagaacggcagtgtgcagaaggcatccgagcggcttcatcttcacaaaaacacccttctttacaggatgaaacggctgttccagctgctggacctggaaaatgagactccctttaccagggaattcctgattcgtctgattttcatgtatcatccggtagatgatatcacctaaacatatttgaggaggttttacaatgtcaggtttatttatattcttagtcatatttctggccgtagtatgtatggtattggccatatccaagtttaaccagcaccccttcatcgtacttacggttatagccattgctgtgggcctggtttgcggaattcccacagaggaagtcatcaacacggtaaaaagcggtttcggaaacatactggccagcatcggtattgtaattctggcaggaaccatcatcggaaccattcttgaaaaaacaggtgctgccctgaccatggccaacaccatccttaaaatggtcggaaaaaagaacagcgtcctgaccatggccatcacaggctatgtgacaggtatccctgtattctgcgactccggctttgtcatcttaagccctatatcaagggccctggccagccagagcaatgtatccctggccgttatggccactgccctgtcaggcggtttatatgcaacccactgtctggttcctcccactcccggccccattgccatggcaggtaccctggaagccgatctggggctgaccatactggtaggacttctggtatccataccagccaccctgtcggcgctcatctatgccaagaaggtatccagcaaaattgatattcccgccaaccctgagtacacagtggatgagctgcttcagaaatacggcaagctgcccggcgctcttcacagcttctcgccaatcctgcttcccatcgtactgattgcacttaaatccgtaggtgatttcccaagcgcaccctttggagacggagttgtaaaaatgttcttctccttcatcggtaatcctgttattgccctgattttaggcgtgttcctggccatgaccctggttccggctgctgagaagaaaaataccttgtcctggattacagaaggtgtcaccaattccgccggcatcctggccatcaccggcgcaggcggcgcgtttggagccattcttcagaaacttcctattgcagatgccctgagcgcttcccttctgggccttggcgtaggcgtattccttcccttcatcattgcggccctgttaaagacagccatgggcgcttccaccgtggccatgattaccacctccgctatgattgccccgctgatgcctgccctgggattcacctccccgctggcaaaggtactggtcatcatggccattggcgccggttccatgaccgtgtcccatgccaatgattcctacttctgggtggtatcccagttttccgatatggagacaaaggatgcttataagtgccagaccggcatgaccggagttatgggtatcgtaactattatagttgtatttctgctttcgctggtgtttgtgcattaatcaggatgcaaatttgttacatgttgtaaaaagaatccccggcccggcccggggattctttttaattttgtttccactgtttttgtttccgttgtagctgcttttaattctttgcgtgggccaatggctcacctttaaaataccgctcaatatcctccacaataatatccagagaaatggctgccagattactgcagttccccgcccggtgaggcgtcagggtaacattgtccagccccagaatgggatgtccttggggaatgggttccacggaaaagacatccagccctgccccgccaatcctgtgttcggccagcgcatccaccaaggcatcctcatccaccagccccgcgcgggctgtattgataaaaaatgccgtgggtttcatcatgtttatatgctccctggtcaccagcccctgggtatctttagtcaggcgggcatgaatacttatataatcagaagtcttcatcagttcgtccagggatacgctcctgcagtttgtatctttgaaaacctcaggcctgcagaatgggtcataggcgattatgctgcagccaaacgcctggagctttgccgccaccctctgtccaataattccatagcccacaagtcctacggttgcgccctttaaacttttaatataggaagaattaggcgcgtctgtcatccactcaccgccatggtccgtaatactcatcctggcaatgtttctggattccgcaagaatcagtccaacagtgtaatcggaaacagggtctgccagacggcccggtgccaccgctacctttaccccctgctctgtggctgccccgatatttatgttctcagctccgcttctggtaactcctatcatcttaaggtttttacctgccttaataactgccgaacccaccggggcaaaattggcaatgatgacctctgcctcctctgcctcctttaagaactccggatttacttcaaagggctccggccctgtcttttccaccttggacgcatactccacaaacatggaacggtcccagtctttctggtcctgtacataaacggtttcagcgccgtaagcctccagacgttttaacacggcctgggcgtccggcgacattactttcggataggtcaaggatgaatctgtcagcataattacttttctcttactcatatatcatttcctttccggattatttctcatatccaatcaatcgtcttacttcttctattgtctctgcctccaatacctttgcggcggtctgccttgcatcttgaagccgcatatcccgtatgcgcttttttatcctgggaatacttgaggcggtcatactgaactcatccagcccaaaccctgccagcagctcagctgctctttcatccccggcaaattcaccgcacataccaacaggctttccctttgcatgggcagcatcaatcaccctttttatatttctgagcacagcgggatgaagtggattataccggtccgcgattttcacattccccctgtctactgctaatgtatactggcataagtcgttggttccgatagagaaaaagtccacatagtttgccaatacgtctgacatggcaacagcagcaggtgtctctaccatgattccaacctgtatatccgggttgaattttgtcccttcagaccgcagctcacccttgcaggcttcaagtatttcattggcctgcaaaagttcttcctttgaaattatcatgggatacattattttaagattgccgaaggcgcttgcgcgcagaatggcgcgaagctgtgtctttaaaacatcaacctgatccagacagatccggattgcgcgccagcccaaaaatggattttcttcatgttcaaatgtgaaatacggaagtgccttgtctcctccaatatccagtgtgcggataatgacaggcttgtcccccatcttctccgctaccactttgtaagctgtaagctgttcctcctccgtgggaaaatgagaattttccatatacaggaattccgttctgtaaagcccgattccctctgcgccataattcagtatcctgtctgcatctgatggatttcctatgttggcgcacagttcaaaaaaagcatggtcctttgtcatggccggctcgtccttaagctgggccagcagctgttttccggccagatactcctcctgcttctgtttataggactcaatctgccccttatccaggttaatgatgattgtgccctccagagcgtccagtatcacccactcttcatccttaagttcttccatcatggatccgattcccaccaccgcaggaatctccagggacctggatatgatggctgtatgggacgttctgcctccctgctctgtcatgaaacccagggtctttgaaaaatccatggacatggtctcagagggagtcaggtctttggctgcaatgatacatggatagggaagtctgcttacatccagggatgctctgccaagaagatagtccataatctgaccgcccacatccctgacatcagccccacgctccctgagatattcatcgtccagcgccgcaaacagcgcctctatctcatccagtgtcagcttaagagcctgctccacattcattctttcgtcccgtatacggtcctttacgccgtcctctatcatggggtcctcaaccaccgataaatgagctgcaaaaatttcagcttcactttcatttaatttatatttggtagactcatacagcgcctgcacatgacaggacaccttctcaagggcttccgtaaaacggctgatttcattctctatatcttcttcacaaattatgtatgcttctactgcacgttcctcttttttcagctttaatacacggccaatggcaattccatctgaaacaggaataccggacaattttttcattgcggtcctcccccagattactctgtcaattcagccagatacgtgacaaccgcctcgagagcctcttcttcgtcctcgccgtcagcgcggaccagcacctgggctccctggttcaaatccagagtcagcacattgatgatgctttttgcgtttgcagtcttattctccttaatcaggctaatcctgcttgcatatttctttaccaggttcacaagcccattggccggtctggcgtgcaagcctgttttatttacaatcgtaacatttttttctaccatgtccaaacctccgttttttaacgtattatacggtccagacgaaactatactccacaatatctgttctgaaaaatactttcgtgtattttacaaccttcccgctcttatcatagaccttactacgtatggacagatggggcgcattggatgtcaggtttaatatttccttttgttccttcgtaggaaccttggccttcaatgtctgcatagaatatgcgatcttcaccccaaattgggtttccatgatttctatgagagacttggtttccatctcccagggattgattccctcaaaaatccacgatggcagataatttacttcctcggcaaagggaacctggtccgcaagccttattctgtgaatgacaatcaccaaatcctcaggatcgcatccaaaaatacttgccaggcgtgaaccgcagctctctgttgtcattgaaagaatcttggagccgggagtgtaaccggctgccaccaaatcatcataaaggctgaatcccttatgggatgtaacgctctcccgcagctttgccacgaaatatcccctgtttggctggcgttccaccagctttgtttcaaccagcgcgttcagggcattgcgtaccgtaaccctgcttacctgatatgtcttactcagtgtgttttctgtcggcagcttatcaccgggagcaagtatgccctcctcaattttagccttgatatcggaaacaatctgataatacaaaggcattgaaacattgagattcttcaacgatatacccccctcccaaattttcgcataacaattaattatattatattggtggaacgagatacaatcaacaattattttgcaaaaatacctgccttcctatgatatgacgggtgttttagagcattgttccgccggaacagtctatagctgcccctataatctgcgatgagcagtccgaacacaggaacgcagccacacgcccaatctcaatgggcagggtaaattttcctgtggggagcagcgcccgcattcgttctgtcctcgcgtccccatccggatatgtacgctctgtctgtacatatccgggtactattccgttgacccggataccgtagggagccatttcattggcaacgcccttggtaagcccgtatgctcccatttttgcactgatatatgtggtattatccttgctgtttgtggtaaacgcagatttggacaatacattgactatgctgccaggccgttcattgtcccgacagtattttacaaatttacggctcatgaagaactggctgttaagggtaatttcctgtaccgacctccagtcctctgtggtaagctggtggaacggcttgcggattgctcctctgcctgcgttattaatcagaatatccactctgccgaaatgctccaatgcagcctgaaaaatcatatcaatctggttttcatcactgacatccgcgttcagctccagtacatccaccccatattgcttcaccagatcatccatataggctctggtgtcctcgtcatgggcaaggtcggcaattgccaggctgcagccttcctgagcaaggaccgtgctgcagccttttccgattccccgtccgcctccggtcacaatcgcgacttttccttttaaacctaaatccatggtgcctccttactgtctattcccctaatccaatcttgtgcattttctccatatattcactgagatccattatcatatccctgcagacagatgctgcctgtgccgccagctcctttccgcgcatctcatcacggtctgataatacctctatcagcattggcatgctgactcccgcgaccccgtataaacatctagtacgggctgcctttgcaagagatttaaagggtgtccctcccataatatccacacatacaaaaacgttcccatcataggaatcaatcagccggttcagctgttcctcataagcttccgggtccattccctcctcaagcgggagactctcaagtctggtaacatctccgaataccatcttgactgagttaaccagttccctgcagaaaaatccatgggaaatgaccagtattgcgggtacctgctgttccatatattctcctttctgtgacttcccccacgttctatgccttaccgcactgattaaacagtttcatataatgaagcagttttgccttgtatccgtctgtcatcagctgatatccaagatgggcccttttaatctcgccgtgacgggccagcagattatcaatccccgcctggaacaggtctgttcctatattaactttcgtgattcccattcttgtggccctggccaggttctcatctcctgaacctgaacctccgtgaagtaccaggggtatctccacttcattataaattttttccagcagctcaaaatccagatacggtgttcccacatattttccatgggcagtgccgattgcaattgccagggcatctattccggttgcctccacataggcctttgcctgttccggatcggtcagccctgcgttgcggtccgcgtcatactgctctccgcttcccacatgtcctaattccgcttccacactgactccaacggcatgggcaattttaaccagttccgcaacctccgccacattctcctcgtagggaaggcttgaacggtccaccatgatggacgaaaaaccggccctcagtgcaatcatggcatgctcaaagcacccgccgtggtccaggttcagcgccacgggaaccgatgcctttcgggccagctttccgcatatatgggcaaataagggtatatcgggatttacattaaagattacatccagaatcaggggagcacggttttcctcagccacctcgatggctgccctggcagtatcctcattgcatatatttggagccactaccccatatctgccttcccttgacttctttaaaatatcgcacatattaactaacataattaactcctccgttttgaggggacgggaaagagatgcggattcaggcatcccctacctgtcccatattaaatgccgtcttacacaatacccaggaatgcgccaacaagacaggccaccagcgtaatgataatcagccttaaatacttgccgcccttttcaaagtaagaatacacacccatcatcaggacaaacggaagcagtccgggaagaatgccgtccagcttttcctgaatggaaatcgcaccgcccagagtctcacttgcaatggaaagcgccaggttcagcttacagtagctggatcccatggctcccagcatgaacattcccataacgccggcgccggccatgagcttcttcatccagccgcctctgagcagggctatcagagaacgtttgcccatcttatatcccaggtcaaaggaccagatacttgccagacatgcgctgaaacggataaatggctccatgagaagtgcggccagtacggaaccgcctaacgcaaatgggataaatacagtcctcactacaggcgcataggtagaccagagcagggaatcaccaaatcccgcaaagggacccatcagggatgatttaagggtaatcacatcgtcgccgtcaattccttccgatccggctgcaatttcttcttccatggccagggcagcacccatgatacagttgcccagggacatttcagatatatacggaagcaggtggcggtcaattgcttctttcagttcttcatccttccccttatacagctttcgcagggcaggcatcatggcatagcccacgcccgtaccatacatagcttccaggctgttgccaaacctgtgtcccagcatgactctccacgcggtccggtgacagtcccgctttgtaagggcgccctcgaaacctccttttttcttaaaaatagacatatcaaagggttcctcaccttcctgtttcggataggccagttggacatatacaattgccaggataatgccaaacacagctgcaaccagggtggtgaatccaaatattttcatggagaaaaagcccagggcaaagaaaggaaggaaattctttttcccaataaaagtcgcgcaaagtacaagtccaaatcccggaaggataccgcctaccacagaaagaccggtaagcagccactggggtacaacgtcaaggatagctgtagttcccctgctgacgcccagcatgatggcaaaaacaatagggacacgtactatgaactgtgtcaggaacggataaatcgtgccgtccatggagatacccttaaagttaagtgcctgcgcatccctgtgggccttacggttccagtagccgtttaccattcttctcgcattgtccataaatgtaccaagaataccaaaaggagttgccagaagaaccgcggttgccgggtccaggcctgatgtcaatgcaatcggtatggccacacaggctgccagtgaatcatctgccggcatgttggcgccaacagcagcgattgatatgtacataatattaatagtcgcgccgataatcgtacccgtaaccacatccccaaaaacaagcccgaacagtacaccgtttaagcaagggttcattaacgccctgcccaggttgcccaaatcacagtttatgacccaataccataccgctatcaaaaagcaacttaaaactgataattccattctttcccctccatcacattttgtaaatcgttatcccttcagattcattatttctttgtcttcatcatgccttcagcttcttatatgcggcttcaaattcaaccaatttatcctccggcgtgggatggaaatacacccttaccccatccccattcagtcctttaagagcatccagctccgcctcgctcaaatggcaggtgttgtttgcgtggtacggcctgtcgggcattttgggtacctgcccaatgttgatggatgtgtagttcagcccttggtcataacatcgtttggccgtgtcgatattctggaaaataatgatggtattctgttccccgtatccatcctttttccattcctccagtgccttggcctcattcattacctgaaccgtgacaccctgaggggctgccagaagcagcagctctgtgagaaaatcatcagccgccgacttattgtcaaccacaacaatcttcttggcctggagaaccttggtccagcgcactgctacctggccgtgaatcagcctggcatcaacccttgtcattactacattactcattaaatattgcacctccttaaacaattttttgtatatttttgttttatttgtatgtctataccataaagcatgtgattcaatttgtcaatatatatttttataaattgattgctttttatattgacaaaagaaacaaattagatacaatataaatagaatcaacgatagacaaacaaaatacaataggaggttatacatggatttaggccataaaggaaagacagtcatcatatccggcggttccaaagggatcggtgccggaatcagtgaagtgtttgcacaggaaggcgccaaccttgtcatcaattaccaccgtaataaagaatcctgcctggaatttgccggctacctgtcagaacgctatggaatcagaacagcaactgttcagggtgatgtgggaaaggaagaagatgtagccgccatatttgactgcgccactcagaacttcggccggattgacattctcgtcaacaatgcaggcaggggcgtctccaaaaaatttaccgatatcacactggaggattggaatcagtgtttaaatgacaatctcaccggacagttccttatgtcaagagagtttgcgcgcagggtaatacctgctaagagaaaaggatggattgtaaacatactctcaaaagcatcctgcacctccaccacaaaggggcgtgtctgctatgtatgcaacaaatccggagaaacaggactgactcactccctggctgtggacctgactgaatatggaatacatgtcaacggcgtcatgccgggctttgtgatggctaatacattaaaaacacagtatgagtcaaaccgcgctgaattcaaccagcgggtggaaagggttcccttaaaacgggtaggggagccatgggaaatcggtaccatggtggcatttctggccagtgacaaatgtgagctggctgtggggacatgcgtggatatgaccggcggcctgctgctgggatattaagtcaggagcactattatgaatccggacaaaaaattggtttttattgaccttgacggaaccttgttggataacagccgcaaaatatcagcccacagcttaagaacgataaaaaaactggagcaatccggcagtattccctgcattgcgtcgggacgcccggcgtccatggtccggctctatacccacgaacttggtctgaatacgccacttatatctaacaacgcggctaatatcagcctagccggaaccatactgcgccagacctgccttcccgctgaatcgggatgggaatttctgaaatactgttttttccatcacctggactgggcggtgttttacacagatgccatctacacagcagacacccccacgcggcttaaaaggtataaagattataacacggagctggtaaaggccggttttcctccggtccccattacagttattcgttccccggatcgggcccgtccccttctggaatcaaaagcagaacggctgtcgctgctgattcattcacagcaggaacgcagactgattctgtcttattttgaacacaccggctctctctcctgcatccgttccactcctgattcttttgacattgtacatcccgaggtggacaaatggtccggcatccggttcattgcggactattatggtatgtccatggaccagatctatgtatttggaaatgacaggaatgacttaaagatgattcggaactgtcccaattcatttgttgtggcaaacggagaaccggaagtgcgaaactgcgccgcccatatcatcggaagaaatgatgaggatggagtggccagggcaattgagcaatacttattattttaatatatagggaaaggagtttttatgaacaattttatgttttacagtcccacccgcttcatattcgggaagggcgaagaaatgaatgtggggaactatatttcccaatacggtgcccgcaaggtgatggtgcttcattacggtactgactttgagtttgagacatctttaatcaacaaaatctttgcatctcttgaccaggctggaattccttatgtggattttaagggaatcaagcccaatcctaccattgagaccggtgacagaggcgttgcggtggttaaggaagaacatgtggattttctgcttgcggtaggaggcggcagcgtgattgacaccgccaaatacataggcgtggcagctctgacggaagagaatgtatgggatgagtattttcttaagaaaacaccggttggcgcaacactgccggttggcgcccttcctaccattgcaggaaccggaagcgagggttccttcagctgtgtcatgacgaagggagtgttaaaacgttccctgaatgatgacaaaatccgccctgtttttgcccttatgaatcctgaattaagctatacccttcctgcgtttcaaaccgcgtgcggagccgttgatatcatggcccatgtccatgaacggtatttcacgcggggggaggacaactatctgaccgacaatctgggtgaaagtatcttccgcacagttatcaagtaccttcccatcgcccttagggaacctgaaaattacaacgccagggcgcagcttctctgggccagtgtattggcccataatgacagctgcggcgtggggcgcgtcactgagggcacggtccacggcattcagtcagagattggcggcatgtatgacagtgcccacggcgccggggtagcctgtgtgacaccgggatggatgaaatatgtgtacaaggcggatccccgccgttttgcccgctactttaaccaggtgtgggaaatggagtacgatacctatgacgtggaaggcatgatactggagggaatcgaacgccagaagcagttttatgtatccgtgggcatccctgtgcattacagcgaactgggcgtgaaggaggaagatataccaaccctgtgctccactgtccgccggggaccagacggcatggccggcaacttcatgaaactcagcaccgatgacctgattaacatttacaagctcttcaaataactcaagaccacatggagcgggtttgacaaaaacctgcccatgctttaaaataaaggaggaaaatcatgtcacttgtaaccttaaaagaaattcttgcacctgctaatgaaaagaactatgcggtagccgcctttgataccatggacttcaccctgacagaaggtatcattgaggcagccgaacagaccggccttcctgtcattctgatgcttccgggatttgcctttgaccgccaggaggccgatgcgttcctggatttcaacctcagcaggattaaaaaggccaaagctcccatctgctatcacctggaccacggcgcttccattgaagaatgctaccgcgccatccatgccggctgttcctctgtcatgtttgatggttccaagctacccctggaagagaatatcgagaagaccaggcaggtggtcaaggttgcccatgcctgcggagtcagcgtggaagccgaaatcggccatgtagctgccccggaaggcagcgttgagggcagcgttgccaaggaggacctgttcacccggccagaggatgcggttacatttgtggaggcgaccggaattgatgcattggccattgcctttggaacggtccacggagtttataagggcaaacccaatcttgattttgagcgccttgccagtatcaagagcatggtggatgttccccttgtcatgcacggaggaagcggacttcctgaaagtgatttcaggaaagcagtggcaggcggaatcaacaaaatcaacttctttaccggcatgtctctggcaaccattgcctccatgcgcaaaatgattgatgaaacggacggccgctgccgttatgtaaatctttttgacacagcgttaaatacagtaattgacattgccaaggaacaaatggaaatctttggtacacaacccatgtaagaatatggatgataaggaatagggattatatgaaaacagcttccaatggttcgcttcccctgtattctcagattgtacaggacatccggaataagatattaaacggaacatataaatacaacgaaaggcttcctaacgagaagtggctctgcaatttatacgacatcagccgtaccaccctgcgcaaatccattgatgagctgattgccgagggacttttggaacgccactccaacaaaggggtctatgtggtctattccaaatttgacaccggattcgaccggccttacagcctgtttcaggagatggtcaaatccggaataaagcccagctctaaaattctgtccttttctcgaatcaacgcggacagtaagctgagccgcgccttaaactgcgaggtgaacacaccgctgctggaaatcctgcgtctcaggtacgcggacgacgtaccttttaatattcagcagctctatctgattgaatccttttttcctcaattcaatccgtggctgctgacggaccattccctgtacgaaatcatggaatccgattaccagataaaaattgtcaaaacagtacaggtcgtaaccacaggctccgtctcaaaaaaccagtcggaactcttaaaggttcctatccgtacgcctctgctccacaccaccagtaccatctattcatccaccggcgatattgtggaataccagcagaacgacatactgaccaatgtaattccttattcatacaaagtgcaaagaccataattagaagaatccatcaaaaacaccgcatcagcgtacatgatatggcgccggtgcggtgttatcttatctgtcaatccattttattatccatggtctcttctgtattttgggcggcctgcggcaaacatccgtacaggaggcctccccggctcctgaaacagtccgtgtcaaaaacttcccggtttgcaatgttgggaggcagctgtccgctcagatagagagtcagagcctggtatagtttctccgactgatatacaattctctccccactgaccccggcaagatggggtgtcagcagaagacgctcctccggaatcgtgtacagcaccgaatcttccggcaggggttcctggtcaaatacgtcgagagctgccttgattcttccctcttttagcgcatcttccagcgcctgggtgtccaccagggctgccctggcagtattgatcagacaggcgttctgtttcatccttcccagcagcttcctgtttatcatatgtcttgtttcatctgtaacacgcgccattaataccacaaaatcagatacagaaaataactcttccaatgttgccaaatcaatctgtaatatatctgagcgccttttatccacataagggtcataccccaccacatgcatctgaaaggcacggcatctggcagccagtcccataccgtttctacccagtcccacgattcccactgtttttcccgacatttccgcagaggactcgttgattcttctaagcctcaggtcattcttctttgtccacttttccatcctgaaaacatgggatgcctgcaacaccggtttcgccatcatcatcattgccagaaatgtaaattctggcaccgaacgttcacagcgcccgctgctgaataataccggtatccccagcctggtgcatgcccggatatcaatattctcctccggtccgtcccgtacgctcagtataagctttaaatcaggacattgatacagtacttcctccgacagtttttcgtaaccagatatatggatatcatatccctgcagggcttttatgatttgttccttgcccatccgcttatcagggtccttatccaggctgaaaccaaccctgtcaatttccaccagttttccgaaacgctctgtccatccatcatcaaattccgccgtacacagtaaacgcaacatatttgtccctccttctatatatcatcttaaattattgtattatttttgtcaatttaaatgttctattttgttgcttttaatctttgtttaagatataatataaatacaatttagcaaaggaggatttacaaatgcgctacaaggaatttggaagtaccggtttggagttatcggaaatatcggtaggaacctgggccctgggaggaaaggatatgggacccgtggatgagaaggatgcaattgaggccatacataccatgatagactgcggtgtcaacttcattgacacggcgcctacttatggaagaggggcctcagagacaattgtgggcaaggctctggcatccggaaaacgcagtcaggttacactgctgacaaaatgcgggatccgttgggaggaaggaccgaagaattttaagaagggcgctatccgtgacagcagccatgacagcatcataaaacagattgacgagtccctgatgcgtctgcagacagactatattgatatctacctgattcactggcccgatgtaaatacacccctggaagaaactgccgatacgttgaaagaactaaaaaaagcaggcaaaatacgcttctccggcatttccaattttgaagataataatcttgaaaaattatatgacctggacgttcttgatgtgatccagtttccgtattccatggttaacagaagtcaggaacaattgttaaagaaatatcatgagaaaggcgttgctaccatgggttatggctcccttggggcgggtatccttaccggttccatccgggagcttccccactttgaacccggtgatgcccgtctgggattctacgatttctttgtggagccaaaattctccagagtcatggagctgcttgaggtactggatgatattgccctgaaacgtcaggtaccggttgcacaggtaaccatcaactggaccgtacagcataacttcatcaacacatctctgaccggtgtcagaaatgccagagaggctgttgagaatacagctgccatggcatggaagctgactgcagatgagatacataaaattgaccaggctgttgcgcagttggattccctgtcataagctgatgaatcattaaaaagaaagaatccccaggccggcccggggattctttcttacacgattctatcttgaatgtttttcctggaacgtttctttccggaacattccctaattgctgctcataaccggcttaaagaccctgctcctggccgggtcctcctgatctgcggactccttagccataagaatggcctcccggcagaactgctcctgggaattgaccaggacctttcccctcttgtcttccttctcgtagctgccgtccggctgaaggatatgggcctttacattgtcctccagctccacttccagaatatggatgaccttttcccttaatacctcgtcctcaacagggaacatgatttccacccggcggtctaagttcctaggcatccagtccgcgctgcccatgtatacctcaggacttgcgtcattaaagaaataaaagatacggctgtgctccaggaagtttcccacaatggaacgcacggaaatattctcgctgagtcccggtacgcctgccttgaggcagcagatacccctgataatcatttccaccttcacgcctgcgcaggacgcctcatacagagctgtgataatttccttgtcacacagtgaattcatcttggccataatatgggcgggccttccttccctggcatgttcagcctccctgcgtatcatgcgcaggaaccgtcccctgagccagagaggggccacagacagcttattccaggccaggggctcggaataacctgacagcatattgaatacagctgtggcgtcctcccctatctggggattgcaggtaagtatgccgcagtccgtgtaaagctttgctgtggaatcattgtaattgccggtgcccagatgtacatagcggcggattccatcttcctccatccgtaccaccagggtaatcttgctgtgggtcttaaggcccaccaggccatatattacatggcaccctgccttctcaagcatctttgcccagttgatattgttttcttcgtcaaaacgggctttcagctccaccagaaccgacacctgctttccattgtccgctgcctccgccaaagccgcaataatgggagagtttccgctgacacggtacagggtctgcttgatggccaggaccgactggtcccgtgcagcgctgcgaacaaagttcaccaccggatcaaaactctgatatggatggtgaagcaggatatcgcccttcctgatattggtgaatatatcgtcttcattcataagggccggcacgggctggggcacatacctgggtgccttgaagagttcaaagccttccagtccatacatcttcatgagaaacgtcaggtccagagggccgttgatttcaaaaatatcctggctgtttatggacagttccctgcggatgattttaaggagacgcttatccacattgtcctcgatttccagacggatggcctcgccccactggcgtttcttaagctgcttctggatttcctccagcaggtccaccgcctcctcctcatctatggtaaggtcggcatttctcatgatgcggaagggatgagaggccacaatgtcataattgaggaacaacgagggcatgttccgctctatgatttcctccagaaggatgaccaccctgcgctccttgccgtcctcatctatctccctgggaagctccacaattctggaaatcaccgagggaacctgcaccatggcaaattccagctcctcatcctctccgctctttttcctcaaaagcgcagcaatattcagcgtcttgttccgtatcagcgggaagggtctggatgaatcaaaggccatgggcgtcagaacaggatatacattcttcctaaaatactcgtccgtatatgccgcctcttcttccgtcatatcctcatgctctgtaatcatgcgcagcccattctgtctcagggttggcaccagagaacggttgtaggttgaatactgcatctccaccagctcatgggtcctctcgctgattcggtccagctgttcctggggcgtcagaccggcaatatcgggcttggtgtactttgcatgtaccatgtcctttaaggaggccaccctgaccatataaaactcgtccagattggaggcggttatgctcaggaatttaagacgttcaaaaaggggaatgctcttgtccctggactcgctgagcacacggtagttgaattccagccagctcagctcacggttaacataattcgtcgggtccgctgcaaaatccacagggactgcttccggcctgacagcggcatttgccttagccccagcctgtgccttagctccggcacttattttagccccgctgttcgccttcaccgtatcgtctgccttaacccctgcattttccctggatgagccgctctttgccgaagcagcccttgaggtatcggttttttccgctctgtttttctctactttcgctttttctgtcttggatttagatgcctgaggctttccagctgattctgccatatctacaccctccttttctgtctgagtatcggccttatgccaaatatctcttcaaagaaatccgccttctgttcaaaggatgcggcttccaacgccatattccccggataaccggtggtgattaccagttcattttcccggatagccatgcggcagtccaccagctttcccctgtggctgcggtccatggaattggccagacgcaggatggccgtcagcttggcaatgaggatggtgatggcgttgcggctcattcctatatcctcctcctgatgcacctgggtctccagctgtaccttgtcatagtcaaaatcacggatattataccgcaccacattggcaatgatctcccgctccagatggctcaggccgatgatttccgtggacataataatgttataggagcattcgttggaattctttatgcttataaactttccgcaggcatggagcagcaccgcaatctgcagcatcagccgttcccgctgccccagtccgtggaatttcttcatgttgtcaaagatacacagggcatactgttccagcacctggttatggctggtgtggcacttatagcgcttcgcaatgttcctggacgcagccagtatatcgttctcaaagttatggctgaatttaactagcttgttctcgctggcatattctgctgcaatgccgtcgcagaggcggatgccgggcacccagaacatctcggccccggtcagctccagaatccgtttgtataccaccacacttggcaggagcagggacgcatactcgctgttgactccgaatcgctcctcgatctgatccgttgtcatctggcacatgcgctcgtagaaacggttcatcgtggccgcgtcaaccttatccccgtaggtattcaggtccagcctgttgataatataaagaatgttctcaccgatgccaatgaggtttgtgatttccctgtccttcagatacatcttccggaaggtgaacagttcattgtccacaatctcctctatatgctgcttgtgttcttccacagtggccggtatcctggctaacagcccccttacgcgaagggtgcccagaggcagattctgagtggtcaccagggaatccttgtcaaaaagagacagctgcgcgcttccgaatcccacatccacgatggcggtccccttctggataattttattaaattctgctgccttggcagctatggccttataactgatgaaccgctgctctgaattactgataatgcgcaccgtaagccctgtcctcacccggatctggtccaggataatctggcggttgtgcgcctccctcatggcactggttgcatatgccctgtagtcctttaccttataggacttcataatctggacaaattcctccagtacctggcacatctcctccaccagctcatagcttatcttacctgtgctgtaggtgtctttaccaagagctattacatggcgtacgtggtcaatacgccggattcctgtcttataggtcatctcatagatacccagctccagctcaaatgaacccacatcaatcgccgcaaatgtccgaactgccacttttctcaactccttatcggtcccttataggttgactcatggttattatatacggcctcctcccatcatacatcgaaaggcggtaaaaactatgtaaaatttacgtaaaaaagtaccgcacagaacctactgccttgccttcagatgggttatgaactgtgcagccgttcttcccgacaaacctccgtggctcagttcccacttgttggcctcggcaaaaagctccggctccggcatatccaggccatggcgatccgccagcgcctttacaatggtctcaaactgtctcttatccggtgagccgtaatagatggtgacaccgaaccgtgctgccagggacagcttttcctgcaccgtatcgttgttgtggagctcgtcgtccagctcccgcttgtcgctgaacttctcacgtataaggtggcggcggttggaggttgcatagatgagcacgttgccaggacgcttgcccagccctccctccagaatcgccttcagatacttatactcaagctcataatcttcaaatgacaggtcatccatataaataatgaacttgtagtttctgtctttaatctgctccagcacatcggacagcgccttaaactggtgcttatatacctcaatgatgcgcagacccctgccataatattcattaagcaccgccttgacgctggaggacttgcctgttcccgcgtctccgaagagaagtacattgttggcttcctttccctccacgaaggcttctgtgttctctatgagtttctgcttctgaagttcatagccaactatatccttaaaatatatgtgctccacattgataatggggtcgatgataacaggctggccttcctccctctcgatgatgcggaacgctttattgagcccgaattttcccacgccgaattccctgtagaaatccaccacatggtcctggaactcccctgcatccgcagattcctccagctgtactgccaggtttacaatcctgtttctgacccggcggttaaatacacggctgtccttcctggccggtttatagtcttccatcagggcccacagtccggagggttccaggtttcgtatatcgtaatcaaacagggccttgaagatccggcagtcctccctggccagctcatccagggaaccgcccgccggtcctgttatctcacatgtggtagtgtatgcattttcattgtttgccagacagaaggccaggaaacaatgccagaggtttccctcaaatccgtacttaacagccagctccgtcagtcgtcccccgcaggacgcaccgtcaggctcctgcccgccctgtgcgtatcccatcagatgggctatatcacgaaacagctcctggtgctccaggtttctatatattactaaatctttgatatccatgaccttcctgcctccctaataatttcccagaatcctcatgctgaccgcttcctcggagattcccaacagtgcgttgcggattgccgggtcgcccagcgagccctccacatccacaaagaaccggtattcccagctgcgtccctctatggggcgggattctatcatcagcatgttcacatcgttataaataaagtttcccagcatattatacagggagccgctcttatgtaaaccttcaaagcagatgcttacctttcccgcatccttcctgtacatgggtttcctggcaacgataatgaacctggtggtattgttcttattgttgttgatggaggcctccagaaccttaaggccgtaaagtgctcctgccgtgggactggctaccgctgcctgggatacttccccctcttccagtactttcttggctgccccggctgtattctccacacttatctggctccactgcctgtgggcgccaagataccctgaacactgcatcagtccctggggatgggaatatacacgcctgatatcctccagggaggcctccggcaggcctaaaagcgcgtggtccactgccacctttgtctctgccacaatgtatatgtcatgcttcagcagattatcgtaattgtcaatcacggcccctgccagggaattctcgatgggaagaactccataatcagcccttccctcctccacctctatcatggcatcctcaaagaccggaacatggtatacatcagcatcttccccaaaatactggagggctgccctgtggctgtaggccccctccactccctggtagacaatgcgcgcaccttccctcttcagctcgtccaccatggtaaatccggtatcaccgcccttgccatgctccgccaaaagacggtactgcagcctgcggctgatggtcataatctgtgagaagagctcatgcactcccttccggttgaattcactgtgggccatggcggccactgcggccagcttctgcttttcccgctgtccgtcgtatacagcctttcccgttccaatcttaaattccgccacctggccgcaaagctccatccgcttttcaaacaattccaccagcctggtatctatctcatccagctggcctctgatttcctgtaaatccagattctccatggttatttatcctgctcctgttcttccttcatctctttcagcataccctctatcacatcccttgtatatgcccctggaaacttgcgtttttcagccggaagctccttgatatagataggttccccgtagcgtatgcacacatggctgggctttacgaagggcaggtgctgttcaaatatctctgccgtacccgtgatggccaccggtataacaggacatccgcttttctgcgcaatcttcagacttccctcatggaacggcagaagctgagtcagctcctggttctcattgcgggttccctccgggaatatccatatggatacgccggatttcaccttctcgatgccttccaggatggtctttaagccctcctttatatccacgcggtccaggaagagacaattgaccctctgcatccaggtgcgcagaaggggtatctttaacatttccttcttagccacaaacccggtcagccccggaaccgtcatataacccaccagtatgtcaaagtagctcctgtggttgcctacatagaggacagccctgtctgacggtatgttctccagccccttcacctcgtatgtaacgcctgccagcttcaatataaaacggaacaccccctgaatctttccaagactcactttctggactcccacagggtccgttttggccctgaacctgagtacggccagtaacggcacggaaaaaatcaggtataatatgacagtcatggccaccaatataatacgtatcattgccttctcctttatacatccttatttatatgtcaagaaatgtttattttccattatatcaaaaaggacggcttaaatacaataccctgcaaccaggtttgtcatttaatcgccgcccttgggcttggtgagatattcaaacaggagacctgtcataaaccagagtggtgcgaacttgagccgtatgaccccgcccacattatcgggccacagggagtagtcccatggacagattcctatactggtaagccatataccggttatatattccgcaataaaaatcagaaccatataaatcagtccgtgccgtatggaccggccaacacggctgagcctgtcctgacctgcgtcctccagtcccggaagaccggtaagccagctgtctatgaaccggcttatgggaagcaggagagctcccatgccatagatgggaaacatgataagggaggtacggcctataagccgccagtccccggccatgatggagtccactgaggtaaacatgacctccagacaccatcctgcgattccgcatctgcaaaagttaagaaataattcgtatattttattttcgtggttgatttgtcctgtctgcgctctcatagccattagtatgagcctgtgcagctgccttctattcgcagacagctgcttttccagaactttccgtgttcccggggcagggatttaccaagctgcggggattttccctctgaagggtttcggcatccccgggaatcctctacaacagcggcgacaaaaggcggctggactgttcctttatgcgcatccacagattcctgtccgcatactcttccctggtgatttcccggcagtggggcaggtcattcataaaggcctcctccagctggcccgtgacttcctcgtcataaatggtggcattgacctcaaagttcagttcaaaacttcgtatatccatgttggctgttccatagcagctcacccttccgtctatcataatgcccttggagtgaaggaagccgttttcatacacgtaaaccctggccccatagtccagaagctcccctgcataggaacaggtagcccagtacacaaagggatggtccggtttgcagggaatcatcagccgcacatccacacctgaaagggccgcaatcttaaggctggaaaatatggcgtcatccggtatgaagtagggagtctgtatatagatatggtgctttgccttgtgaaacagctccaggtaattattccgtatatggggctccctggtatccggtccgctggtaataatctgcatgcagaccatctcgtttacatggtccgggtccggccacacagcatgaatctggccgttcagccggcgtctggcatactctgcctcctccccaaagtagcggatttccttaaacaggttctcccctgtcacgtagttccagtccagcgcaaaacggatctgcagactgatggctgcctccccctttatttccagatgggtatcacgccagtagccaaacttggggtcccgcgatatatattcacggcctatgttaaagccacccacaaaccccgtgttaccgtccaccaccacgattttccggtggtttcggtaatttaccctcaggttaagccatcccaggaagggaggaaagaatacccccaccttgatccccgcactgcgcatctggtcccagcgcttcttcggcatgaagcggccgcccatgccgtcgcacaggattctcacttccacgccttccctcaccttatccagaagaatggggacaatggagtcaaacagctcatcgttcttgatgatatagtactgtatgtggataaacctgcgggcctggcgcagggcatttctcagggcctcaaatttagcctgcccgtccgtgtatatctgcacctggttgttcaccgtaagcacagaccccgatgtctccagattatagataatcaggctcttaaaatctctggacatggggtccatcatttcctccggcatgtcgtcggagcgtatgatgtcttcctggcttttgaccggcaggttcagcctgtcgctgacttccttcacccggaacatcctgctcttcttcatatcctggccaaagagcaggtaaaagacgattccgaacaccgggatgaagtacagggccagaagccaggtccagacacttctggggtccctgcgctgaaaaaatatgataataattgaaaatgccagattgatatacagcaggtggtccagcagccatccccataccgtcagtaccgtactccagattaattccattttacagcctctctcctaatctgatgcttccgttatattcccatcctcgtcaatattcagtttcacggtgcagtaccggttttcatatttcaggacctgcaggcggcctgtggccagatccgcctccacagagacgattctggctcccttctgcccaccggatatatagtcctttaacggcccgtcggaattgctgagatccaggcccattagcctgagaagcattcctccggtcagcttacccttttccttctcgtcattcagataacgctggaccgcgtccacgcaaatccgggcctctgtctgtgcggttgcctcatgggcagcgtttatatagttcatcatattaggcaccgcgatacacaaaagtatggacaggattgcaaccaccgcaatcagttccaccagagtaaacgcacaattttcctttttcttcatgtcctttttcctcatatcttatgcttcccgccataagcctccgataatggctcattgtatcacatataggatttaatttccagactcaatcctgccctccccggtatcgccattataaacggccttatacgttttgccgtttatctggccttcccagtaggcgctgttcttatctttatcaaaatggtattcctctttctcagattcctttatgacgcccgcgtccagcatgtcctgctgtgcctttcccagtgtataattggatctggcattggatatggctacctgctccgctgatttgtcctggattccccggtaggagggcactgctatggccaccagtattcccagtatggcaatgacacagattagttccaccagcgtaaatccttccgttctcttctttccctttttcatatgtatactcattatcatgactcctcttttcttttgtacgattgcagctccctactggacggaatacagtattttctcagcctcctccatatcggtttccccgtcggcagccatcctcaggacatggtcccttagaggcatggagcctttcttttcctagtattcgcggatggatgaaaggggctcattatcaagtatcatggccttaatctgttcatccacatccattatctcatagaccgctgtcctcccggtatatcccgtacccccgcaaagaggacagcccgcagacctccacagcctgtctggaatatgtctcccccgctccgcaaatatcctttgttcccgctcgtccggctcgtagggctgacggcagttgggacagagcagctttaccagtctctgggctatgattccggacagggaagccgctgccatataaggaggaactcccatattgcggagtctgtgaatggtggaagcgcagtcattggtatgaagggtggacaggaccagatgtcctgtgatggctgccctgactccgatggccactgtctcctcatccctcatttcgcctaccatgatcacgtccgggtcctgtcttaagatggatcgcagagcagacgcaaatgtaaggccggctttggaattgacctgaacctgggtaattccgtccataactttctcagccggatcctccactgtaactatgttgatcttctttttcaccatccggtttatggcagcgtacagggtggttgtctttccgcttccagtgggacctgtcaccaggaccataccgtgaggcgccttaaggatatgctcaaatacaatcctctgttcttcctccattcccagacgccttatatccatcagcgagttattcctgtcatttcccaaaagcctgagaactgctttctctccataaatggagggaagggtggagattctcaggtccgtggacacctcaccccgctcataatgatattttccatcctgcggaagacgcttttccgcaatgtccataccggccatcagcttaagcctggttatcatgggacggtgatattccattttaagcgtagtatggaccattaggtccccgttgattctgatgcggatgaccagatcattctttcccggctccacatgaatgtcactggcatttttatggaaggcctcctctatgaccgtattgaccatgcgtaccacaggagcgctttccacccgttccatgaaggccagctctgaaacagaggcttccgcagccgcgccaactcccacaccgggcctctccattgaaacatatggattctctccgtatacgtgctccggtgcggaaccataggcctttttaagcgcctgcttcagttccttctccggcgccagcactgccctgaccttcataccggacagggtttccacctcatccagcacatcgggagacaccggataggctgccgccactataagacactcttcctcaaaactcatgggaagaatccggtttctcacggcaaaggacggctcaatcacggccgctgacttacgatcagccttgagagggccaaaaggcgccacctccatatggtccctggcagctgcacaggtcagcagtgctgcttctgtaacataaccgaactctgtcagtatttcctcaatggagcattccggccttccctgcttaagacgcatggcgcggtccagctggctccgggtcagatatccactgtcaatcaacaggttttctataggtattttatctggcactgttgtctcctctcccttccatatggtatactttcgccaggcagcagtttatgacggaagcgaggtaataccatggtttttatctattttgtattatacggactgttaggcgcagtgacaggcagctttctgaatgtctgtatcctgcgcatacctgcaaaccagaattttgtaaccgggcgttcccactgtccggcatgcggccatgtactggccttttacgatatggttcctgttctgtcctggttatttctaaagggccggtgccggtattgcagggcccctgtttccattcagtatccggctgtggagcttctcactgcatctgcctttctcctgtgtctcctggcaaaagggccaggtatggagtcagcccttatgtgtatgttttccagtattcttattacagctgcatttatagacgcacggcacatgtacatacctgacggcatccatatcctgattctgctgctgtcctgtatctcactggcagccggatccggacccgccattattaaccggctgggcggctcccttctggcaggcggtttcctggctcttgtaaatctgcttagccggggaggcgttggctggggcgacgtaaagctctttgctgccagcggtctgctgattggcgcagctcctgcaataacggcccttctgatgggctatgtcgcagcaggcctttggtatgcagttcctcttgtgcggggaagggttggccgaaagacgcagatacctatggccccgttttttgcagtgtccctgatggtatgcggtctttggttcagacagctgttcctgtggtatctgggttttttccggtaatggaccacacccgtttcatttctcatggtcagctgccttcataatagcggtatacaccgtttccattcagataaacttttacttccgggtcatcccctctgctggagcggtacggtttgccaatgaccatcacggatccgtcccggtcatcaaatacaatgtccgccatcatggaaaagctgtacccgctgctctctaccctggtgcggaccgtggccagggatttaaggggatgcgctgtcaatgtaatgtcaattgttgttgtgctgtctgttatgttactgtctgtagtaaaaccgtctgccgcaggggcatccgccgcaccatcatctgtgccgccggaatcctctgaacatccctttccgtggaccacatatttcttgttccccaatgcatggtacagataccgttcccagcgaagttcttcctctgcatccgttgtatccgtgtcctcctccgaagaaaaggattctgccttaagttccccatcttccccttcctcagcctcttcttcgtccatcattgcatcaaattcttccctgaccctgtcgcagtcttcctggaaattctgccagatcagattcatggccggggactccccactgcttactgcctcgcagaaggagcggtgaatggtcttggcggagagctgggcctccatatagcgcctgtttttcagggcagctttcatattgtaccgggaaatagccatatatccgctggacagcacagctaaaagcgtcatgagcagtaccacatacatcaggctgcttccacgggtatgcccattattttttcttactgttcttctcctgcccatcatgtcccgccttcccaatccatggtataaccatacatggaaccgatggccgtcttctgctcatatataacatccccgtccttcttcacctttatgctcactttggcccgcgtattctttgttccgctaaaatccagctctaattccataccgcccagttccgccacttctaattcctcggcggagatactcggccagtcctccaccggcggcagttcttcataatatgacctgccctccttaatatccggaatcttctctctgtcccttacatagtacgatatcacacctgtatcttggtaatcgcagaaaaatacatagccgtacctcagcttttcctccagaccgcgatacgcctcgctgcacatggcctttgcctgggaaagccggtccagctcataatacagcttcatctgcggatggatgaaaccggaaataaatacagccaggaccgcggcaatggccagcgcagccactgtctcaatcaatgtaaatcctccgttgttcttccctgtcctgcttcctttcgccatattccccgcctttatctgtgcctgtaaaatgtcatatggttgcctgtatcctcctccgattcagtgatttcatactgttcaaatatttcccggactccgttctcttcttccaggccaaactccactgcaatggtttctccggtaggctctccctccccttcgccggccaaggcgctgaggttataattagactgttccaatctctgctccccggacagctggcctgcattggcagccgtcatcatcagaaaccctgtacagacaactgccaggagggcagttgataccacaatctcaatcagagtaaaccctcctctggatgacctgttaaccgatttcttcataataatacctgacctccacgattcccttcattccctgatacgtttcctgtccatcctctccgctctcatacacagcttccacatccataaagcttaccaaaacacttttctgttccctgtatatttcatctgcaaacgtcatcacaccctttgggtccggacattctatttccatggtaatgactgattcctttaccgtcctgccggctggcccgctttccacggccggcttcccgctttcctccgggtcatcgctttgcgcgtcataggtttgcgtatcataggaaatttctgccgcagcagctccgcctatactcatgcggcgtatgcttacccctgccctggctgccatgtcctgcaagctcctgtccataaaaatatcatcaatatcccggtagaaaaaatcctctgtattccttaaacgctcccattcctttaacttctgttccagttcctcataatggctcaggtaaaattccatttcctccctttcctgattcccgctttccatcagctccatggacttccggtatccggcgcggcacggccagataaatacttccagcgccacagcccagataatgatggtgaacaatacacctatgagaaaccgctccctgctactgagcttcatcctgtcctcccattcccagagttccgtaaacagttgcgtatatccgctctgtctccctgtcctctgcgctcttttcccacaggctgtgtcctacctgcctgaaaatcccggaatgttccaccctctccacgtaggccggtacatcctcagaacgatccatggacaccaccatctgaaggtaaggcccctcgccgtcaaaggaaatggattcaattctcatctccggattcatggcctctgtaaatgccctgaattcattcatgcccagcagattctttccggccaacagcgccttctctgtccgtgttttctccctgtcaaccgacatttcacctattctttcttccatctccatggatttacggacacgggtcttatactccgctccttccatcgcatactctgtcctggccagcgctttccctgccgcatggtccatataggccgcgtgaaaggacaatcccgccgccgccaatccgttggcaagcaggaataaagcccagcctctggtcataaacggcccgcggcccagaatagagttctttccatcctcatatccccgttcctccagttccagagcctttctctttccctccagggaaccagccacacaaactgccagacatacggcgtccactggttccggcattctgacactgcagggtatcttaaaccgtccggacatatattcagccgctgcctgtgcgtcaggaatacaggatgtcatgagtaccatacaatccgggacaggaacatctgacgccgcagtacagtcctgtatcaggtcctccacctgctccgccatttcttcacagagcatgtccactgctccctcccgcagaaaacagccggccttcaggcctgtcatacggcatgccagacaatgtccgcctgacaacacataaaagcccatgctggcctggttcacatccagcagaagaacccgctcttccctccatagctccctggccataatggccatacagtcaggcaggaccaggacacggccgcatatcatcttcccgtcctccacggccttcttatacgcatccagactgcgctgttccatatagtaggcagtaacatccgccattgtcctgccggttttcgccctcagatccagggctgctgcatggtttccaaaatccggatccagcagggacatctcattgactgccattcttttcatggcgttctttcctgcctttggaatggcaaagctcatcatcctgacatcccgtccagctatcagattgacacgtttcccctccatgccgtatttttcagcaagacgcgtcagggccgatgccacatcaggcaccggctccacgaattcccactccactatttccaggcagcggcgaagcccggaacccgcacaccgtttaaacctgccgcggacataacatatcctgtcctcttccaaacatatgtaatattccattttctacctcttacagcattgacgagtacatgttaaatacaggcatcatgatggccatgaccacactgcctaccaccagggcaagtatgagaatcatggctggctccagaagggcaatcatctggttgactgccctggctgcctccttttcataaaaacttcccgcatcctccagcaccatatccaatgcgcctgattcctctcctgctgccaccatagagatgagcaccggctggaacagattcagctcatccaacgcctgggacagcatcacgcctccttttaagctctccgcaacctggaccagtcccttctccacatatgagtttcccatgacccgccctacggtgtgcatggcatccagaattccaattccgcttccgtaaagcacggcaaaggcagatgcaaagcgggatgtatatacggtgcttaaaagttttcctattattggagtatacagcacagcccggtctgcctgcagccggacaaaaggacatgttagaatccccttgaacagggccatcaataccagaataagcataatgtagagaaccccgcggctgcggaggctgaaactgagcctcatcatcatccgggtaatccagggcagctcctgctcctgcagcatggaggcaaactgcggaagaaccgtggtcagcataaatacggcggctaacacggtaatagaaaacaatatgaccggatacgtcatggccgcccgcaccttgccatttaattcttcctcccggccgtagtaccccgccatcttatggagcagttcatccagccttccgctggactcgcccgtgcgcgtcatataaaccagcagattaggaaatactcccttcatctcctccatggcttctgacaaggtacgtcccttgtgtatgctctccctgagtccggcaagcgtcaccttaagggtcttatccctggcagaccccgcgctcacctccaaagctctggacagcggcactccggctgtcagcatggctgctaactgcctgcacagcagaggaagctgtctctgattcagctttgccggacgcgctgagggtgtccgctccagcgagctgtattcataacaatagagtcccctggatttaagtatgacgaaaagagcccggccgctgtctgccttctcggttccacagtgaactcttccatcttcacttttcgccctgtatctgtaacgcggcatggttcccctccccctttccatatggcattcatatgtacaaaaccggctttatctgatataagtcagacaaagccggccgcaaaacacttatatatgattttattaacggaaactattctgagtcggctcatattggtagccaataccagacagtacagatataattctggacttatccgcatccaatgcctggcacatctcgtccaaagaactataattgtcacggagctgcgtgtttacataactcagcaaaataactgggtctttcggaatggtactcacaatttttacctgctttctattacctcatattgattaaatccacatcaaataccctatatctagttctattccggctataggtacaccggctttcagcagaaacgattatatcacctgcaagtaacgttttcaacatgaaattagggtattttccctacttttttcgtcattcccagaagttgatgtaattatatttcttcattagaaattttctgaaaaatacctcctaatttatggaaaaaagcaagggagagaacctgtttgcgcagattcgctccctcacctgtatcttcatatatatttatctaacatcattccacatatgcaatcagccgtgttttgtcctcgtccacatctatgacaatggtgcttccttccctgactccgtcacccagtataattctcgctgccagggtctccacattcttctggagataacgtttcaggggacgggcaccataggccggatcatatcccttatccgttacgaattccttggctcccattgtcagctctatggtcagttccctgtcggccagacgtttattcaggtctgccacacagagatccacaattcttgcgatatccattctggttaagggcttaaagagtatggtttcatccagacggtttaagaactccggtctgaaatgggcgcgaagctcatctataaccatattttccacctggggcctgatgtttccgttctcatcaattccttccagcagatactgggaaccgatgttggaggtgaggataatgatggtattcttaaagtccacggtcctgccctgggaatccgtgatacgtccatcatccaggacctgcaaaagtacgttaaacacgtccggatgggccttctccacttcgtcaaacagcaccacgctgtatggtttgcggcgcacggcctctgtcagctgtcctccctcgtcgtatccaacgtatcctggaggcgctccgataagacgcgacacggaatgcttctccatgtactcgctcatatcaatccgaattatgttggactcgtcgtcaaacaacgcctcggcaagggctttggccagctccgtcttacctacaccggtaggccccaggaacaggaaggatccgattggcttggtggggtccttgatgcctgccttggaacggatgatggactgggttaccagctgcacgccttcatcctggcccaccacacgtttgtgaagaacctcatccagatgcagggtcttgcttctctcactctctgtcagcttggcaaccggaattccggtccatttggatacgattcttgcaatctcatcctctgaaacgctctccctcacaaggcttaagtcctcattgcggatgcgttcctcttccgcctgcagctccttctggagttccggcagtctgccatactgcagctccgccgctttattcaggtcatacttctgctgtgcgtcctgaatctccctgtttacactctctatctcttccctgagggacgaaagacggtccacactggccttttcattctcccactgggcttttttagacgcgaactcatcgtgaagctcagccagctctttctggagatccgccaggcggtcctggctcagacggtctgtttccttcttaagggctgcttcctctatctccatctgcatgattttcctggacatctcatccagctccgcaggcatggtatccatctcagtcttaatcatggcgcaggcttcatccaccaggtcaatggccttatcaggcaggaaacggtcggtaatataccggtcggacagggtggctgcactcaccagagcagagtctgttatcttcactccatggaatacttcatagcgctccttaagtcccctcagtatggagatagtatcctccaccgtgggttcatccaccatcaccggctggaatcttcgttccagcgcagcgtccttctctatatactggcggtactcattgagtgtggtggcgccgatacagtgaagctctcccctggccagcatgggctttagcatattgcccgcgtccattgacccctctgtcttacctgcccccacaatggtatgcagctcatcaataaacaaaataatctgcccgtcgctcttttttacctcttccagcacagccttcagccgttcctcaaattcacccctgtacttggctcccgccaccagggctcccatgtccagggcaaagagcttcttatccttcagtccgtccgggacatccccccgcacgattctctgggccagaccttccaccacggctgtcttgcccacgccgggctcaccgataagcaccgggttgttcttcgtcttacgggagaggatacggataacattacgaatctcgctgtcacggccgataaccgggtccagcttctggtccctggcccgctccaccaggtcatatccgtatttggctaatgtatcataggtggcctcaggattatcgctgaccaccctctggttgccccttactgtggacagtgcctgaagaaatgtctcacgggttatattatataacttgaataacgccttgatttccttattgggatgctttaaaagagacaggaacaagtgctccacggatacatattcatcacccatggcctttgcctcgtcctctccgcttatgagcaccttattcaaatcactgctgatgtaaagctggccgctgccgcttaccttgggcagccgctccactgcctgctttgcctcgttagaaaacatatctccctgtattcccatcttggtaatcagcttaagaatcaggctgtcctccagggtcagcaggctgtacagaaggtgctgctcatcaatctgctggtttccgtattcatatgccagcttctcacagttctgaactgcttccattgacttctgagtaaatttattaatattcattgcccattcccctttcttctctgccgcctctgaccagaatgcctgtgtgtatcctccggaagcagcggcctacggaattgtgctttgtcatctttgttctagtcgtactataacacatgttgttagcactgtcaagggtcgagtgctaattattttaaataaaaaatgccgcggcacagtccttatctgtctgtgccgcggccagctgcatcttctctacttcacgccggtagctgtaattgtcttgtttgtaagggttccctcgtagataacagttgcggtatcccctaccttcagtttgtcaaacatgccttcttttcccaggaaggtaaacagggtattctccgggtccgctgtgtcgatgaccacataatccgccccaacttctgccaccttgccggaaagagtattgatcttagcgtcttctgagtccatggcatcctcggtcacaattttggtggccaccggtttgtcggtctcgtcttccaggtccccgtagtaggtcacatctgcctgtactccggacttgatgccgtccttggataccttctgcgcaatcttggtgttaaaggtatatgtaccctcgtccgtggtcagggtcagggtattgtcgtctgctttctctacggttcctgtgacaatgtcatcctcctcagcggctgcctcttccgctgcctctgctgctgcagatgtaacgatatccactgattttgccttggtggtgtctgcggaaagctcacctgcgtaggcaacctctacctcatcaccttctccaatggcatctgcgccttcaatcttagcctcagatacatcaaacttcacttctttgccttcgtcgtccttaacggtaaccaccttatcagctacctctcccacaaaaccatagaagtattccagttccatatcgtcttctgcttctgtcgctttctctgtctcagtctgggatgctgtagtagttggggccgctgtagtttctttattgccggaagaacaagctgtcatccccaatgcaagtgccaggactgcaactgccaaatagtgtctcttcataataatctcctcttttctaaatcatgatatgtcatatactatgccaggacgggcagcatattccccctgcctttgtccacgttacatattactacgaaaaacactattttactatgtctttttctttaatttttcataaaagtttaaatactccccagttttctgatggactctgataccagctttttgaagagaggggccattttatccgacgcctcctggacctccttgtgggacaaaggaacgtctgtcataccacaggccagattggatatacaggatataccgcatatcttcatccccatgtgattggccgccactgcctcgcaggccgtactcatgccaactgcatccccgcccagtatcctgcacattttcacctcatgcgggctttcgtaggcaggtcctgtaagctgcacatagaccccctcctgtatcctgattccaagctcaagagcagtggagcggataatatccctcaggtcctcatcatatatatggctcatatccgggaaccttggtcccagctcctccaggttcggccccaccagcggggaggggacaaagcaggatatctggtcctttatgagcataaagtcccctgccccataatcatagttgactccgccggccgcattggtcagaaagaggatttccgctcccataagcttcataagacggacaggcaggaccacatctgacatgggatagccctcataataatggacccgtccctgcatcagcacggccggaacctcatttatacgggcgaacacaaacctgcccttatgtccgggtaccgtagataccggaaatccctctatatcgtggtaatcaatggtcccctggatttccagctgctccgcatagtcaccaagaccggaccccagcaccagtgccaccttaggttcaaagggaatcttatcttttatgctgtcatagcagtttctcagcttgtcatacacaggatttgtcatatctgttctccttttctagcgggagtttatccctcccttgttatgtgaagtatatcatacctgagccgcagggctcaaccttttatgcgaggcaggcatcttcttcggtgctcccgccggttctgcctgtaccacactgccaaaagagccagcagtcccacgcctatgcctatgagtccagcccccaccgttatgacaaaaccgctgcgtacccagtaccagagacttccttccgggccttcaccctgaatctccggcgcaggtacatgttctgccccctgagctgtctccaaagctgcaggagaaaccgcggaaatctgcctgtaaaccatctccagctcttgggtttccggtttaatccagctgacttccccttcatattcagcctcatagtccctaaggagcttttgtccccagaccatggcctggcggcacattctcccctcctcatcctcgtatgactccccataccagtctgcggagagtatgcggtactccaggggagacaggcccataaactccagcagctgtccccccatggacacgcaggtctctaaaaccgcgtcccccggtataaccagggaacctccatggtattcatccgcaccgtaggcgtgaaaggtgacaggcgccgtaaatccatcctgccactcctctcttacaatccggcttttcctcaggaacagggttccctctgcctggcttcccgatacatcctccttcaaagaaatggaccctggaatctcttcagccccttccacaccagtatacaccatcttccgctccagacgccggctgacatcctgtcctggaattgtcactatctcccaggaatccagccggtactcctttccatcaccgtcccaataccggtcagccggctcccggattccaccgtcctctgccgtctccacatcccgggtgatccgaagctctgcgccataaccttcctcctgcggttcctgcgccgccatggccgccccgctgcctgacagccagaatacagctgccgccacggcagtcacagcaagcacagccctgcccattttacctcttatattcaaccgtctttccggcggtattcctttctctctatatgccataagcattcctcccggctatctgccattttacaaactgccggagaacagtatacaaatcatatgaatatgtcaatgtgcacagatgaaaactgcctgctaaaatgggaaacacgggtttcagaagaaaacctcgcctctgtgcagacgcacagccagatgtctgaagaaaacaatctgtggtcttattatacataacctgagaacaagaatcaagggtaattccgatattattcacctcatatggagggacttatatgccgggcctgatatgccggtacttatatgctgggacgctcaatcaatccccggcccccatggacagcagggcggacaaaaagacggtatcccctctccgctagaaggaataccgtctctaatttacctgcctctgcactgtcagctgaagaatcacggtctgaactggctgtacttgtgtccgggagcaattcctcccctgtaggccgccagctcgcttactgtcaccagctgatatccccgcgctgtcagttccggaatcagcaccaccgccgcatctgctgttgtactgtagatatcatgcatcagtatgatatccccatcctttacctggctcagcacggtgtcaatagtcctctgcgcattcctgtgctgccagtccctggtatcaatggaccacatgatggcgggcatacccatagagcccagcacgttaagggatgccccatcaatatatccgcccggcgggcgcatgaggaccggtgatacgccgcagacagcctggatcttctggttggtagatcccacctggcttacaattccctctgcaccgattttagtcaggtatttgtggtcatgggtgtggttggcaacctcgcatccctggtccaccatgcgcctgattacgcctgcattggcgttcacattggaacccagcatgaagaatgttgcccttcctccattggcctgcagactgtccagtatccggctggtcacggatgtcttgggtccgtcatcaaatgtaagggcaatcatgggcctggatgggtcaattccatgggaaaccaccggttccgcaggaatccctgcacccttagccgtgatggaagcccgtatgccgtccaccctgagacctgccccctcctgtccggcagacgcgccattggccgcccagtctgtccaggcgccgttctgaagtactttatagtataaatcatatgcggctgcgccgctgccagtcagttccatgcgtatggattccagaggcatgacgccttctgctcctcctgtctcagctccgtcctccgcccaggagagccaacccgtaccgctcagattcacctggtagcgaatacccacctgtgtaccgtccggaatatgaatcagattagcctttacggcagtgacccatgagttgaccggggctgaacacaaattgttatcagccgtgaccgcgctccatccctgctgcaatataaaagcactgtaattcacctggagaggttcctggcccgtaaccggctgtgtgctctgttcctggcccaccggctgagctgtctggccctcggcctggcctgtctggccttccgcctgggctgcctgtccctccgtctggcctgcctggcccaccggctgtactgcctggccttccgcctggcctgtctggccgttctggccctccggctgtactgtctggccctccgcctggtcggtctggctatcattctgtgctgccacacccggacctgtctgggccggcttagccgcacctacccctgtacttccggcgaatgccgtcattccctgcatacttaaaataattccggctgccaagacagcagccagaatctttgactttttcccaaatctgatcattcacattctcctcgcatcatgtctttatttgaggaaataacatcctcaccgaacacggccctgcataacatcacatattccttgaaatacaggtggtcctccaactccttcagagcatgggctatcccccaatagtaccgggcatgcttccgcttatccttttcattaaaccgctgccatatggcatcgcccaccaccatataatccctggccgtacagcgcatgttgctgagcttgtcccccagagccaatatcttaatctccctggaagccgtgcagagatgtctgaccgtacgggtctttcgctcctgccagctgcggcttttatcctcgctctcatccactaccagatccgctactctggaaccaaacgtgtcctccagttcttccctggtaactcctgcatcttccataacatcatgaagcagcgctgccgcaatgatttcctcatcatccgtaaaggcggacacaatcactgccgtctccatgggatgcgtgatgtacggaatcttcgtgccctttctgaaagctcccttgtgggctttatctgcaaacgcagccgcttctccaatcataggtcttactccttctgtgatagcactatttatattccttatgtacctctccctttgatgtcaggaatcatacctatcataacatattcaggcggcattttgaagggtattgtggaatctttgccattttccaagttaaacttgtaagaaaagagaatttctgatatgctatagaagtattttttccgcaatacttaaggaggataattcatggatcgtcattcgtcatattcggctccccgcagcgaacgtgcttccggttcttacggcggcaaccgcggcagaagcaccaaacgcaacacctataataaacgttcatggaacgataacagaaaactgcataccctggtattctacatactcccctttatcctaatcaatctggtcatattcattgtggccacatccaaaccaaagatagagtatgatgtatctgacaccagggattaccgcagcgtggatatatccatccgcatacgttcccttctccccatacgcgaaaccagcgtcaccatggaatcccagccccttgaaatggaaaaggaaaagggagtctacactgccaccctgaccagcaacgggaccctgcagatatatgtgaagggatggaacggaatgtctgccagactgtctgacaccattcaagccctggacgatatggcgcctaccatacaggaagattatgtgatggaaaacggcattctaaccattacagcggaggacagccagtccggtattaactttgatgctgtctatgccacggatgaagaggaaaagactgtcaaacccagccatattaataaagaatccggagagatcaccttccccatggatactcagacccttgtagtatttgtggcggattacgcgggcaataccataaaaagctcctatttcagcgtaaaagacggcatagacctcagcggccgtgacaaggaattcccttcagacggcaccaacggcactaacggcagcagctccaaaggttcgggcacggataaggaaaccagcaaggccaaggaaagcaccaaggccaaagaaaccaccaaggccaaggagaccaccaaggccaaggagaccaccaaagccaaggagactaccaaggccaaggaaaccaccaaagccaaggagactaccaaggccaaggagaccaccaaagccaaggagaccactaaggccgcagaatccactaaagccgcagaatccaccgcggccacaacagctgccctgtctcccgccgacccccagacgccatcgcctactcagtcgtcacaggcaccgtctcccactcaggcgccgcaggcaccatcacctacccaggcatcacaggcaccgtctcctgataacggttcgggggataatgtcaccatcgtacccctgggctgacacttatctgagtctatccgtaaaaaaatcaatcaaaataagaccatggatccactgcacggaccatggtctgttttttgctctatattctaatttatttctatcctgtccaatctgaagcctgtcactgtcttcccgtgtccatgatatcgtcaataatatccacatattcagaacagtatttttcgtacataggggccgcggcttcctggaaccgttctttctccctggcatccagctccgtcaccacgcatccggctctcctgaccctgtcctctgaggtcttctcacgctcatcccacagttcacgctcatacagggccgatttctgtgcacaatcccgtataatgttcctgtattcctccggcagcttatcccaggtggactgggctgccagctggagttccggaaccctggtgtgttcatccagggtgaaatatttggccacctcataatgcctggtggactcataggaaggccagttgttctcggccccgtctatctcccctgtctgcaggcctgaatatacatccccaaaagccatgggcaccggcgtggcacccagagcctgaatcgtatccatcatcagttcagattcctggaccctgattttaagccccttcatgtcgtccagggactcaatgggcccggccgtactgtagaaattacgggcgcctgcatcataccaggacagcggcaccaggctggaaccgccgaaggaattcatgaaatccgtgccaatgggcccctctaacaccttccacatgtgctctcttcctgtatacagatagggcatctgaagtacattcagcttgggcacaaactcagccaggggcgacagggataccctggcaaaatccaccccgccaaactgaagctgttcaatcactgttttctcgtctccgagaacaccgcccgcattgacctgtatctccaccctgcctccggtctgttcatgtaccagctctgcaaatttataagctccctgggtggtgggataatcctccgcctgattctcagcatatgtcaggacgaactccggaactgtcttctgcgccgtgctgtccttgcttctgcctgcacaggacgcggccagaatcattacagcggcgcagcccatgaggtaaatcacattttttctcaagcagccgtccctcccttcgcatatatcataccccagttaccagacccggtcaaggagggcctgtcctttaattatgcacattcctgccttccaccttagaagaggcataacggtaaaattcttctttctcatttccaagcacacggtttgtaaatataaatccatgggtggtatcgctgaatataataatcatggcaggtttcctggatatcctttttaccgacttccacggcagctgcgacgtgtcatcgcccacccggatgtaaagcccgttgtcgtcaatagaaacctgggtgtcctgggtaatccccgcctcctgcttctttgccttggcataaatcataagcggctggattactgtaaaaaggcagcaccccagcacaatgagacacctcacgatcccctgggcctggtcccacctggagaagcccaaggcaaatgccgccactgtaaatatgatattacaaagtcctgccagcgaaccgtatatataatacatggaaagctgccataaatcccgcgctgttgtcctgtatgtgtatttgtatctcattcatatgctccttgtacggatgtcctgaatcttaacagagtggcgacatggccgccactctgaactttcattataacatgataaactgctttccggtattcatttattagtgggccagtacagatggaagccacatgctgacagccggaataaaggtaatcagcagcagggtgataatcatacacacatagaatggaagcgtagccttaaccacccgctccatgggcaccttggaaaccgcagagccaatgaacagaacagcgccaacaggaggtgtcagaagtccgataccgcagttaagcactaccatgataccaaactgaatcgggtccagaccaatggatgtggcgataggcagcaggataggggttgcaatcaggatgattggcgccatatccatgatacatccgagcaccagaagaatcaggttcagcagcagggccagaataatggggttattggtcatgccggtgattgcgctggcggccaggataggcacatgcagctgggtcaggcagaatccgaaaatattggatgtggcaatgagaatcattacaatggacagggtgtccacgctgtctcccaggactctccatacgcccttccagtccagtcccctgtagataaacacgctgacaatcaggctgtagataacagcaactgctgcggactctgtggccgtaaacacaccgcccaccacgccgaatacaactatcagcacagctgccagagcccagaaggaaacactcagctgcttaatcaggttgatgatgctgaacttctcacccttagggtaattacgcttaacggaaatgatataggatcctatcatcagcgttacggccagcagtgctcccggtatatatcctgccaggaaaaggcttcccacggagataccgcctgccgtggtggcatagataaccatattgtggctgggaggcaccagcagtccctcacaggatgaagtgatggttactgctgttgaaaaatcgtcatcgtatccctggtccaccatcatgggaatcaggatggaaccaagagaagccgtatctgcagaagcagaacctgagataccgccaaagaaataagaagcgacaatattaaccattgccatgccgccccgcatccatcccacacatgcattggccagtgcaatcagcttttcggaaataccgccggaacccatcaggcatcccatggtgataaagaagggaacagccatcaggctgaaggagctgattccctttaccatctgctggcagatggtagtcaggttatgtccctggaacaaaaggcagaacacagatgaaagcgccaccgcataagcgatggggaaccgtaagaataccatcaggaagaagctgcccagcaaaaccagaattgccatgctatttgcatccattactccatcccctcctttacaaagaaactcttaacatgattgtataaggcctctacttcaaaaaccagcatggccacgccggccagaggcaccgggaaatacatccagaacctggaaaccttgggcatgctcacataggtacctttggagccgattcctgttgcatacttccagcccactgtaatcatgattaccgccagcgcaagtactgccaggtcagcgatgatatcaaggctctttaccaccttagcgggcagataccggtcaaatgcggtcatgcggatatgggcgcctcttctgatggcaagagctgccgaaagcactgccatataggacatgcaggtcagaacaacctcttcactccacgcaggatcgggaatgaacgaaatgtaccttcctgccacagccatggtggtgataaggatatccactaccagaagcagcttgcaaaggaacagtacaaccctgtatgtcatatcatatgcaggcctgattttatcaatcttttgaaatattgcaggcatattgattcccctttcaaaaactacaggcacagagtttattcatttgccctgtgcctgtctgattgccgtttattatttgttcatgtcaagaatctgctgatacagttcagcctggtcctttgtagaagactcgatgatgcctttacaagcatcctgccatggcttgatatcaggaacctcaaccacgttgatgccatcggcctttaattcctcaagcaccttgttctcagcttcctcagaaatggttctgttgaactgggatgcaaccttgccggcttccatcaggatgttctgctgctcttctgtcagcttatcccatgcttcatctgtgatgataacctggattgcgcccagtgtatggccgtccagaatcaggtttggagcaacttcctggaatgcgttggacttgtagtttgcgattggctgctcagcaccgtccacaacaccggtctgaagtgcggagtacagttcgttgaaggaaacaaccgttgggcttgcgccgaggccttccaccataccattcataatcgggtcattggacacacgcagcttcatgccctttaagtcgtctaagcccttaacttccttaactgtgaagaagtgacggaagccttcctcgccgtagtacaggcctcttactccaagtccgttgtcatgaggttccatgaggaattcaggagccagttcgctgtcagcaaacttccagaagtggtcacggtttgcaaatgtataaggaatggacagaagcacggacttctcagcgccgtagcttgtcagggcaaatgcggaaatacgggaaatatcaatggtgccgccgccgccaagcatggtatccagaacgtcgttctctgaaccaagtactccgctggcctgcaggtcaatcttaatcttgccgccggacagttcctcaacagtctccttaaatttggtatcagtctgtcccacaatggtgtctaacgggttaacctctgccataaccagagtaacctcaggcatgtcgctggtatcagctgctgcctcggtatcagctgcttctgtctttgactcctcagcagcatccccctctgcctttgcagcctctgtaggtgcctcagttgctgcgggagccgctgtggtagcatcagggctctttaagccgcagcctgccagggagccggctaccattgctgcacacaacgcggtactaatccatctttttttcatgaaacgtgtcctcctcttaatacttttttcatgctttcacatgatatttttatgttttcttaacactgattttattataagagtattttgcgtttctgaacatagtaaatttttgtgaatcatagtaggattttaacttgtttctcccatccatttatgcaaatatcacatatatggtctttatacaatctttatcccttctggaaaatagacagtctgtactcagtggggctctgtcccgttatgcgcttgaacacctttgcaaagtaattggaatccccatagcccactgcccttccaatctccttcacattgaccgttggctggcttagcatcttcttggcttcctttatccggtactgtgtcaggtaggatgtgaaattctggtcaaaacactgcttgaacagcttgcagaaataggcctctgaataattcatggcccttgcggcatcctgcatggaaatgtcaaacatataattctcatgtatgtactggctgattaaggatgtaacctttgacagacgggcatgtcctccgtcctccggttcctctgtgtctggcggcgcaggaatttcattttcattttcatccccatccccttcatcctgccggtgttcccccgcaatatgcatggcttcctccaccactaacatcagttcctcctcgtcgtaaggcttcagaaggtaatccagggcccttaccgtgatggccttttttgcataggagaactcgtcaaaggctgtcaggaatatgatgcagcagtccttgtcggcctgccggatctgctgggcagcttctatgccgtttatgcccggcatctcgatgtccagaatggcaatctgtatcttctcttcctcatagatcttaagggcttccctgccgttggctgcctggaaaatccggcacctgtcccccagatttttctgcagcgtcttataaaggacctgcctctcaatcatctcatcatccgcaatcagtaaacgcaacatccgttcccccccttatatcttctgatagtcctcttcccgggcggcaggcaggataatctggaccacggtccccttgcctgccttgctgtagattctcaaatccccatcctcgtacatggatttaatcctctgatatatattccccagcccaattcccaccctggctgtccggtgtcccttaagggcatccataagccttttgagcgcctcttcctccatccccacaccggtatcagccagggaaatgactatcttgtccttccacttccatatccttaaaaatatcctccctccctcctccttcctggctatgccgtgtatgatggcattttccaccagcggctgaagggtaaaagccggtatcatggtctcgccgccgtccacctccaccctaaggtcatggctgatacggctgccaaaacgcatctgctgtatgtacatatagtcctgcaccaccttaagctcccgctccaggggcacaatctgctccgaggtcttaagattatagcggaagagatttcccaggctggatatcatccgctctgtggtctgggcttcctccagtttagccatacaggatatcatattcagggtattaaacaggaaatggggattaatctggctcttaagcagttccaggcgggccgcgtccagacgtttctccatctcgatgcgctccacctcctccttatgaagacgctccgccatctcgtttttctctttcaaagtattgatatacccctctgtggcatgcttcatcttattaaatgcctgtaccagctctcccatctcatcccggttctccaccaccaggtcctcaccgccgaaatcatttctcgctatctccctggagctgtgggccagctttaccatgggggcaatcagggtattggacagaagcttggtcagacagataaccgtaataatcatcaggacggaacaggccataatcatgtagggaaggtcatagaggagaggaaccttttcctggtagctgcgctttccctccttcagggtagactgcatcagtcttctggcgtaagtctgcagataaccctgcattccatataccctgtacaattgctccacaaatccttcatccgactggtccatgtgaaggacctggtcccggaaagtctggtagccttcatagccattcttaatattccatgtcctggcataccgctcaggcccaatgacatcatagtcaaagggcagggcctccagactgctctccgtcttaaaacaggccagcctgtattgctttgcattctcccaggaccgctccctcacatagagttcaaaggcatccgcttcctgctccatggactcctgcacatcatagcagagggaattgtcattgagtatcacgttaaaactctccagggaaaaattcatgaccagcatattgaaggcaatggacagacccattaccaaaatgacaaccactgaaaatgcgcccagctttttcttcaacgagattgaaagccactgatttttaatataagaaaacataccctaccccaatcgcaccagaatgtgtctgaaacctgctttcttccggctgtttgtccaatttgcgctctgcgtaaccgtatcaagcatccttcaccctgccatccctcctggaatgcccatggtccggtcagtgtctttcgccattataccatataataacagggagcgcaaagcccccggccttgcgctccagttattcccaatcacctattttgtttcactgccttcggtttttgaagcggttatctgcttctggttcttcttagctgtcccgatctgcttccggctctttttggacgtgctgatctgtttctgttcttccttggacgtggctatctgctcctgcttcttcctggaagtacctatctgcttctgctcctccttggacgtggctatctgctcctgcctctttctggaagtacctatctgcttctgctcctccttggacgtggctatctgctcctgcctcttcctggaagtgcctatctgcttctgctcctccttggacgtggctatctgctcctgcctcttcctggaagtgcctatctgtttctgctcctccttggacgtggctatctgctcctgcttcttcctggatgtgcctatttgcttctgttcttccttggatgtgcctatctgcttctgctcctccttggtcgtggctatctgctcctgcttcttcctggaagtgcctatctgcttctgcacctccctggtcgtgcctatctgcttcttctcttccttggtcgttcctatctgcttcttctcttccttggtcgtgcctatctgcttctgttcttccctggacgtgcctatctgcttctgctcttccttggttgtgattatctgcttctgccctgccttgaacgcagccataggcttctgtacatcctttgcaactgcagcgccttctgtctcctgcgccacagcagttatcctctttggggacgctgttttgcttaccgctgttttactagccgctgtttttccggatgccgcttttctggccgcaggctttttatctgctgcctttttaactccaggcttctttgcctcaggcttctcggattcttccgcctgcgtgcatgtgtagatgctgacgctcatcggcggtatatagacttcaatggaatcgtccttttcatcccattccagcttccgggatgtcttgacacgcccgttgacccggccttctccgccaaagtctttggcatcagtgttgaatatctccttatacttaccgtggaagggcacgcccacacggaatttctcatgctccatattgtcaaaattgcagataaagagaagggtttcctcactcttcctgctctttcgcaggaatataatcatgctctcattctggtaactgcagttaatccactcaaaaccatcgggatcataatccatctcatacagagccgggtgctcacggtacagcctgttaagcgccttcacataatcctgcatgttcttgtgaacaggatactccaaaagtccccactccagggacgcgccctcattccattcagccgtctgggcgtattcctggcccataaacagcagcttcttgccgggatgccccatcataaaggcataggcagccctcaggttctcggccttcttttccagggtctcacccggcatcttgccaatcatggaacccttgccgtgaaccacctcatcgtgggagaataccagcacaaaatcctcactgtaggcatacagcatggaaaatgtcagctccccataattgtttttcctgaaaagagggtcgcaccgcatgtagttggtaaaatcattcatccagcccatgttccacttatagttaaatcccaggccgccctctttcggatcgcctgtaatcattggccatgcagtggactcctccgcgatgatgaccgtgccgtcctttcggcccttgaatacggaattcagatgcttcaggaactccattgcctccagattctcattgcctccgtatatattaggcacccattcaccgtcattcttcccatagtccagatagagcatggaagctaccgcatccatcctgattccgtccgcatggtacttgtccgcccagaacagcgcattggcaatcagaaaattggttacgccgggacggccgtaattgtatatcagagtgccccaatggggatgggagcccttcctggggtccatgtgttcatagacgcaggtgccgtcaaacacagccattccataggcatcccttgggaaatgggccggcacccagtcaagtatgacgccgattccctgtccgtgcatatagtccataaagtacatgaaatcctcaggagcaccgtaacggctggtaggggcataataccctgttacctgataaccccaggattcatccagaggatgctccatcacaggcatgagctccacatgggtgtatcccatatcctttacgtattccgccagccttggagccagctcccggtaattataaaattcggaacccgccaggtcctgtcctgtctcatccctgacagtctccttacggatccaggagcccagatggacctcatatatgttcatgggcttgtcctttgtatcggtctttgccctctgatccatccatgacttgtcgttccatttgtatttatcaatatcccatacaatagaggcattgttgggacgcagctctgcgtagtttgcatagggatcagccttcagcataggctcccctgcccttgtctttatctcgtacttatatatctcaccttcatacagaccgggaatgaacagctcgaacacgctgccgtccccttcgcccaggcggcgcatctgatggcgtcttccatcccaaaggttgaaatcccccaccacgctgacgcgcatggcgcatggcgcccacacggaaaagtacacgccggataccccgtcaatggtcatgggatgggcgcccattttctcataaattgtatagtggatgcccgctgcaaatttcttcaggtcttcttcccggtactggggagcaaatgaatagggatcacagagttcctccgtcaccccgttgtcataggtgacctccagggtatagggcgtcttgctcttgcgtggtatcagggccgcgaaaaaaccagcctcgtccgccagctccatgggatatttcttcccggtggtggaaatcttcacactgatttcagccgcagtgggtaccagcgcctgaatcagaagtccatcctctgtcagatggggtcccagcatggcatggggattggatgcttccgaatacaccagttcttcaatccctgcccagtccatcaaatcgtataatttctgttccatatgattgcccccttgtaagtttattcattcttcggtctgatatcagcatgcctgctgtatatcctacttctaaagggtatttgccctgtcagcaatattctgtctgaaattaaccacatcatgctcgtattcttcatccataaggggagaagtaatcatgaaatccgcactggccttgttatttgcaatgggaatatcatacacctgggcaatccttaacaaagccttaacatccggatcgtggggctgcgctgtcagcggatcggaaaagaaaatcacaaaatcaatttttccctccacaatcttggccccaatctgctggtcgccgcccaaggggccgctgttatacccctttacaggcaggttggttgcatccgtaatcatacgggccgttgtgccggtcccgcacaggaaatgcctggacagtatatccttatgttccccgcaccactgtatcagttcccgtttcttctggtcgtgggcaatcagggcaatgttcttctgtctgcgtattgtcataggtaaataatccattttcatctgtctcctttcagtctgtcactttgttggcgatggtacctatcccttctatggtacactccaccacatctcccggaaccaggaatttcggcgggtcaaagcccatgcccactcctgccggggttcccgtggcaataatggttcctggctttaaggtcatgccctgggaaagttcgcttacaatgtgactgatatcaaatatgagcagctccgtattactgtcctggcgaagttcgccgttcaccctggactgtacctgtactttgggcggataggacaattcatccaccgtggctatgcatggtcccatgggcagaaagccgtccagccccttgccgaaataccactgcttatgccgtgtctgcagggtcctggcgctgacgtcattgatgatagtatatccgaatatatagtcctttacatcttcctccctgacatgggatgcctcgcggccgatgatgactgccagctctgcctcgtaatccaaatccgttacaatatccctgtggcttgggatgcctgccccgggatccgtggcacggtttacccgcttggaaaaatagatggcatggggcctttccccgtcaaatgcttccttcttaaatctggccgattcctcagcgtgagccatgtaattgattcccaggcagataacatcctgccgagggtggggaatcggggctaaaaggcttacctccccaataggggcagcccccctgaccttatatgggtcctggccggacacatactccagcagctgtttctccgactcgctgatgttctctatcagctcctgcatggtcttataatccatatccagggaagcaaggggatagacccagcttccgtccctgctgatgactccaagtccggatttgtgttcgatttcatatgtaactagtctcataatgccctcctgcttataccattacgtgtatctcatgtttactctatcacatttttccgaatttttctacgattttgccattatttcagaaatcgcccttccccctgtcagagcccttctgcctaataaatagactcccggagtatcttatgtatctggattgccagagtgggcaggaaagcggccgccgccagggtggtaagctggctcaggcttaaatcggctgcggcaaacatgatttgaaggcccggcacaaagagcaccgctgccagaagaaccacgcccagctggaacgccataacgctgtacaggttgcttcccagccccagacgtatgatggaatggctgctgcggcagttgaatccgtggaacagccgggccagggtaagggtggaaaatgccatggtacaggcccttcccgcaccgccctcatgaagtccggtggtataggcccacatggtggctgccgcaatcagggctccctggaccaggatatcccgtataaaggacgccgtgaggatgccctcctttggatttctgggcggctcctttaacagaccttcctccggcggttccatccctatggcaatggccggcagggaatccgttataaggttgataaacagcagatgcaccggtttaaagggcaggggcagggacagaagggatgtgtataatacgcagaaaatgcctgccatgttgcctgacaaaaggaactggatggagttctttatatttctgtacacattcctgccgttggatactgcctttatgatggtggcaaaattgtcgtccgccaatatcatggacgccgcatccttggacacctcggttcccgtgattcccatggccacgccgatatcggccttcttaagggccggggcgtcattgacaccgtctccggtcattgccacaatgtgtccccggttctgccatgccttgacaatacgtatcttgtgctccggcgataccctggcatagactgaaatgtgttccagactccggttcaaatcctcctcttccatctggtccagctccgcccctgtcaccgccatgttgcccggcgtaaatatgccgatccgctctgctatggacatggcggtcactttatggtcccctgtgatcatcacagggcgtatgcctgcctgcctggcgctggccaccgcctggcgcgattccggcctgggcggatccatcatggcagtgagccccagaaacaccagattatcctccagccttcctgacagggatgagcgttcctggctgttccctgcttttgccccggctaagccggaattaccgtgctcctttccctcctcattgaaaggacggcatgcaaaagccaggacccggagccccctggcagaccagcggctgttctggtccagtatcctctggcggtccgaggacgacaaggtacggcagggtatggctgcctctggcctctggccggattcccccggcctctgaccggctgcccctgtcccctggccggctaaccctgtcccctggccggcggccggattagccaggcgggtgcattttttcagcagcacatccacggctcccttgacaaagacgatatcgtgtccttctatctcatttacggtagtcataagcttgcggcgggagtcaaagggaatctccccctttctgggactctggagccgaacctgttccgggataagccctgcctcccttgccatgttaaacagcgctgtctccatggggtccccgtcctggccggaggcgttgttattaagaaccgcccccataagcaggagcctgacatcgctccttctcttttcattttccagccatgacggctgctgctgcgtgtggttgacgtacacctgctccacatccatgcggttctgtgtcagggttcccgtcttatcggaacagataacagagacgcatcccaggctctccaccgccttcaaatcttttatgatagcctgttcccttgccattttctgggtgcccatggcctggacaatggtgacgatggagctgagcgcctccggtatggctgccactgccagggccacggcaaacatcagggcatccagcaccggttcccggcggtacaggctgagcaaaaacaccaggccgcagatggctatgatggcaatggccagatgtccggagaaccggtccaggcttacctgaagcggggtcttttgttccttggttccgttcatcagcacagctatcttaccgatttccgtattcattcccgtggctgttaccgctgccacggcacggcctgaggtcaccagggaaccggaaaataccatgttggtccggtcggccaatgccacggttccctcccgcgccttcaccgccccggtgtgtttctccacccccagggattcccctgtaagggagctctcattgacggtcagcccgtacacctccagcagccgtccgtccgcggccaccatatcgccggtctccagcagcaggatatcccccggtaccaccagggcggacggtatggtcatgctgcgcccgtcccgcaggaccctggcttcaggcgaggaaagccgctttaagctgtccagggatttttccgccttctggtgctggaccgttcccagcactgcatttagcagcaggaccgcaaatatgaccatggcgctctccggatcccctgtgagcatggacactgcggccgccccgatcaggataatgaccaaaaggtccttaaactgcgcaagaaatacctgccaccactggagccgtcctgcctcctccaatacattttccccatattccttaagacgctgctccgcctgcccgctgtcaattccctgccttccggagtccagcccggctaacacctctgcctccggctgttcaaaccaatctgccatctgtctctcccctcttaccgaattcatggttcttatgagcctgcgctaatgtgcgtctgcttccccggtatccgccggatgccgcgtgaacagatataaaaatgctcccggaagcgcatgcgtacgctgtttccgggagcactccataagagtacccactctaaatctatgaattagtaagaatcattatgaccggccgtacacagccggggcgagaaagctttaccgcctgtccttaaaatcaatcccttcttccgaaaatcataccgaatgccaccttatagccttcctccagggaatctgtctccacatattcctccctggtatgggcccctgcgccgcggaagcttcccacgcacacgcttggaatccccaaggacagcgggatattgcagtccgtggatccggcatggtgtttgggcgcctgtccggtcatttcttcaaccacccggtgggcccagtctgtcagggcctgcttttgtgccgggtccacctggccttcgcagggcctgacccctataacctggaaagacacgtccatcccctctgcctttgcacggtcaagcacctccatgaactgccgttccatatattccaggttctcccttttgtcggaacggaactcgtacagcatctcggcttcctgggcaatggtattaaccgatgtccctcctgatatcatacctacattataggttgtctttccgccctccggcacctggattttataaagcttccccaccagggacgccagtcccgctatggcattatcattgccaaagtcattgtaggaatgaccgccccgggtgcggacctttacccggaagcgcttggaacccaccgccctgtccacgatgctggaaagagaactgtcaaaggtacaaaagctctttatcctgccgccgtagtcctcgcagatcttacgcactcccttcaggtttcccagaccttcttcccctgcattgcacaccagcagaagtccgggggcatcctccccccggatttccctccaactgggagaatccacatgccgggctatatatttccctgccagcagaagacataccagacatgccgtgtcgtctcccacgccgggacaatagatgcgtccgtcctctacccttaagggaagttctgtctcatcggaaaacaccacatccatatgggccatgaacacatccaacggcctgtcctggcttacatccgccggatacaccacattaagttcctggtcaatatatacgcccctggcgccctgggacttaagccagttcagacagaattcagcccgcctctcttcatggttggagggcgccggtatcctggccagctccagaagaaggctgtaagcctcctgcctgtggctctctatataccgtatcatttcctctgacagtatcatctgcttcctcttcctttctttcgccttttcccgctgcctttcccctggaggctttcttctgcgcgggaacctcctttcccatgagaaccacgatggtccttgccataatcattatggacttctggttctccagaaccggttcactgcccccgggatacatgccgttcacctggtcctcgtccgtattaaaggccgtatgccacttatagtccttcggcaggttgggaagggcaaactcatgtggttcccagtgcatgttaaacgcaacgtagaagtagtcgtcctcccttccgtccggctttttaccgtattttccgcagtataatatacccagctggcggaggaaacggtcaaacatgggacaccaggtcttaaggccgtggtaggacacgtccggcagccccacggagcggtaatccatcagggccggctccttctccatatggaacacggagtgctcctttctgaattgaattacatgctttacaaattcatggaggctgctgttggaatttaacaggccccagttaagccatgatatatcattgtcctggcagtaggagttgttgtttcccttcttggtccggccaaattcgtcccccatcataagcaaaggagttccctggcttaaaaacagcatgagcagggcattgcgtatctgtttcctgcgcatctgcatgatgcgtttctttctgctggggccttccactccgcagttccaggactggttgtagtctgttccgtcccggttctcctccccgttggcctcattgtgctttgtgtcataggacaccatgtccatcagggtaaagccattggtattagccatgtagttgacaacgcccacctggccgggattatgacggatgtggtataccagacggttaagctggtcctcatcccccttcagaaagcttcgcatatccatcatgaacccgtcattatattcagccagatgtttttcctgccccggctccacaccgtcccacccgggcgccaacagcttcagcctgctgaggtacggatcctcgcccaaaagcttcacaggcgcatagcccaccagccggacgccgtccacgtggtattcctgagcccagaagcggaccacatccagcacataggagggcgcttccttcccgtcaaagaataattccagaaccagttccagtcctgccctgtggagggccttcaccatatccttaaactcccgttcaggctccctcacaggtccgctgctgtaggcacacttaggcgcaaaataataccctctggtatatccccagtaattcagctttccgtccggttcttcagctgcaaaaggacttccgtccacacgctccggtatgattaactcctcaaactccaccgggggcatcatctccacagtggtgatccccaggtctttgagataaggtatcttctccgccacgcccttaaaggttcccctgctgtctccttccaggccggaggaggcatgtttggtaaatcccctggtatgaatatggtaaatcacacactggtcataagggatgcagggtaggatatcatcctcccagtcgtacgcgcccccttctgtatccaccggcgtgcggaccggcttgtcccggcgcgccaggcttccccagcgctccatgcccgtaaacttcctcccgtaaggatccggcatctgctgtccgtctacctcgtacacgtactccaggccggaaaagtctcccagcacagtcatgctccacacatcccctgttctggcatttaccggaaattcgattctacccttggggcttttggcccctttcctatataaaataacggcgcaggtctctcccttagaggggaaagaaaaatgcacccctccggagacagcagtcactcccatcgcatatatccttccatcattcctgtctatccggaatcccttcatcatagctgttaccgcctttcccaagaccactgtttctgaattatcaacaactgtttttaagtggattttctatttgaaactgtcataagcacgataagaaaagtatatagttaattcgatattttgtcaataaatcaacactccctggcagaaatcgtcatctttttatgcacaaaaagaactggttatcagaaaaatacaacccgtctgataaccagctcccatactgtgcctgctgttatttctgcgcctctatctgctccaccagctcgttaagatacatccagcgctccatcttctcctccagctgtgcttccctggcggacttttcctccatcagctcattgagcctggtatagttggtggcagattttccaatctcctgctccaaatctccgatggactgttccagagccgcaatatccgcctcaatggtttcccattcccgctgttccttaaaggaaagcttgcgcttcttttcgccgcctgcggcctgcttccagttattccggtttatggggaggccggacccgttttcatcactgtctccggctcttacgcccttctgctcccctgtctcctggggatgtctggcggaccaggcaatctgataatccgtaaatccgccctcatactgggtcacctttccctgtccctcaaaggcaaagattcggttcacaacgcggtccaggaaataccggtcatgggatacggctataactatgcccggaaatgtatccagatagtcctccagtatggtcagtgtctggatgtccaggtcattggtgggctcgtccaacagtatcacattaggcgcctccataaggatacgcagcaggtaaagcctccgcctctccccgcctgataagcggcctatggaggtatactgcataccggaggggaataaaaaccgctctaacatctggctggcgctgatactgccgtcctttgtctttacgtactcagccacatttttaatatagtcgataaccttaaggctttcatccatggcctcattttcctgggaaaaataccccatcttcacggtctgtcctatctggatggtgccggaatccggttccacccagcctgccagcatcttcatcagggtggactttccgcttccgttggggccgatgatacccacacggtcatttttcaggaaaatgtaggtgaaatccttcatcagcaccttgtccccgtaagccttgcacagatccttcacctccaccgtggtcctgcctaaccggctggctatggattccagctccacgttgcggtcatattccggccccttctggtcccgaagctcctcataccgctgtatatgggccttctgcttggtggaacgggccctggctccccgctgcatccaggcaatctcattgcgcagaatggtctgccgtttacgctccgatgcctcggccatctccatgcgctccgccttcagggcaaggaagccctcataattagcctggtagctgtagagctttcccttgtccagctccacaatgcggcccaccacgctgtccaggaagtaccggtcatgggtaatcatcagcagggcgccccggaaggctttcagatattcctccagccagtcagccataccgctgtccagatggttggtaggctcgtccagtatcagaaggtccgctgtactcataagcacactggctaaggccaccctctttctctgtccgccggaaagggtggatgtcagggcatcgtgttctatgatacccagcttgttaagcatgctcttggccgtggcctgcatctcgtccgcagaactgtagtgggtttccccggcattttcccgcataacgctttcaagcaccgtatccccctccgcgaattccgggatctgggacagatagcgtatgtagaggctgcggccccttaccacgctgccgctgtccgcatcttccagccccgcgacaatcttaaggagagtggacttgcccgtgccgttgacgccaatcagcccaatcttctccccctcgttgatggagaaggacgtgtcgtcaaacagcagcctctccgtatatgattttgtcaaatgttcaatggtaaccagattcatcgtcttttcctcttattcaatcaccagctccaccgggcaatggtctgaacccataaccgtattgtggatggatgcgcttaccagtctgtccttaaggctttctgatacacaaaaatagtcaatgcgccaccctgcattcttggccctggcgctgaaacggtaggaccaccaggagtaagtcccctccaggtccggatagaaatagcggaacgtgtccacaaagcctgctgccagaaggtctgtgaacttgcccctctcctcatcggtaaagccggcatttttcctgtttgtcttgggattcttaaggtcaatctccttgtgggccacattcagatccccgcagaataccacaggcttgttttcctccagtttcttaaggtatgccaggaaatcgtcctcccacttcatcctgtaatccagcctagccaggccgtcctgtgaattgggggtatagcaggtcaccacataatattcaggaaactctgccgtaatcacacgcccctcggtatcgtgttcctccatgccgatgccataggacacggacacgggttcctctttcgtgaacatggctgtgccggaatatccctttttcctggcgtagttccagtactggtgatagccaggcaggtccagttcaatctgcccctcctgaagcttgctttcctgtatacaaaatacatctgcctccgcttccctgaaaaaatccagaaagcctttacctacgcaggccctgaggccgtttacattccacgaaatcaacttagtcattctttatggctcctctccggaacatggtccgggaatgggtttccggtatgttcctgtgtcgttttcaaacagctgcctactccggatataccagcctggattccgggaactggtccacatggtacagtacttccaggtacttcccggccaggtatctggccatgcccaaattcatatccagataattgccgcagtcctttggcgacgccccgggcacctccccctgaaaatccctgataaactcatacatttccaccatcagaggcaggatatccgcggactggtaatcccctgccagaagcagatagaaaccggtcctgcaccccatgggtccgaagtaaatgcactttttgccaaaggtgccgtgattccttaaaaaggttgcccccagatgctcaatggtatgcatttctgcggtgttcatcaccggctcctcattgggcgaggtcatccgcaggtcaaaggtggtcaccattcccccttccacctggtccttcctggatacatagactccaggctgcagcttattgtggtcaatggtaaaacttgtaattttttccatatctgttctcctcttaatccgctccatactcataaaatgactgaaaaggggcaggatttatccatcctgccgccctgtcactgccactatattaatcatctgcctcttcactctcagtcagtgtgaaggtaaatctcttacgtgccatctcgtcgctttcaaggtactcgtcataggtggtaatcttatcaaccagcttgccgttaatgatttccatgatacggtttgcagtagtctgcacaatctggtggtcacgggaggagaaaatcatcacgcccgggaacttaatcataccgcggttcagggcgtcgatagactccatgtccaggtggtccgtaggctcatccaacatcagcacattggcgccggatatcatcatcttggacagcatgcagcgcaccttctcacctccggaaagaaccttcaccttctttactccgtcctcgccggcaaacagcatgcgtcccaggaaaccgcggacataggttacgtccttctcaggagaatactgggtcagccactctacgatggtgtcgtcgttgtcaaactcggcgctgttatccttggggaaataagcctgcgaggtggtaagaccccacttatagctaccctcatccggctccatctcaccggacagaatcttaaagagcacggtcttggcccgctcatttggtcctaccagggcaaccttgtcctcgcggcccagaatgaaggagatatcgtccagtatcttttcgccgtcaatggtcttgcttaagtgctccacggtcaggacctcattgccaatctcgcggaaaggacggaaatcaatgtacggatacttacggctggaaggacggatgtcgtccagctcaatcttctcaagggcgcgcttacgggaagtggcctgcttggacttggacgcattggcggagaagcgctggataaattcctggagctccttaatcttctcttccttcttgcggttggcttccttcatctgcttcacaatcagctggctggactctacccagaagtcgtagtttcctgcgaacagctggatttttccgtagtcaatgtcagctatctgggtgcagactttattcaggaaataacggtcatgggataccacgataactgtattctcaaagttaatcaaaaactcctccagccacgcaatggcatccaggtccaggtggttggtaggctcatccagaagcaggatgtcggggttgccgaacagggcctgggccagaagtacctttaccttctgggcgcccagaagggatcccatctgcgcatagtgcaggtccggctcaataccaagtccgtttaaaaggctttcagcatctgactctgcctcccatccgttcatgttggcaaattcaccctctaactcagcggccttgatgccgtcctcgtccgtgaagtcctccttcatgtagatggcttccttttccttcattatctcatacagtctcttattgcccatgatgaccgtatccaggaccgtgtactggtcatacttaaagtggtcctgctgcaggaaggacagcctctgtccgggagtgatgatgacatcgccgctggtaggctccaactggcctgacaggatcttaaggaatgtggactttccggcaccgtttgcaccgatgagtccatagcagttgccctcggtgaatttgatattcacatcctcaaacaatgccttcttgcccacgcgaagagatatgttgcttgtactaatcatgttcgttacctttctcttaatctgttcttcttaatctgttccgctgatatttctggtatctgctgatatttctagtaaaagaggggtcatgtacggcccctctcacgctgtttactcaatatcagattgtacagggaaaacacttattttgcaagggtttttcgcaaaattgtggcggcagcccgtctatttcgttcctttaatctccaccggatagtttactccctgggaattcacataggtcacagtcaccttatccccgctgtcacctgccagggccccttcctcaatggggcagttatcctttaagaagcttaactcctgtccgtcgtctgtctttatggtaaagctgctcatcgcgttagccgtggtggttcctttctcagtgagaatactccactcttcctgttccggaagggccaccaccagggtcacgtcctccaggctgcccaggggctctcctatatatgcaatggctatctgcacatcctcctcaatctccacctccacgtcccggatgtcggactggctgatatcatagtccctgccgtcgtccgcctgaagggtgaacaccgaaccgtccgctgtcacctttgtaacggtgccctgaagcatatggtatacttcctttgcctcagccgcctgctccgttgtctcctgtgccttggccgttgtctcaggcgctttggtggtctcctcagccgaagcctggctggtaactgtctcagatgtctccaccgccggttttttggcacagcccgttcccagcaccatcgccgcagccagagcgactgctgttatcatcaatgaatgtttcttcatattgcaattcctcccgtcttatatcagattacctatgaagcttatcatcatatcctgttaatttcaataaagattcccttaattttcccggtatcataaccagtactccggtcaatcccatgcccagaatcccgggcagatgccggagacacaggagtatgaccagacgtctggctgcgggtgacagttccatggcagtaccttccttttttgtaagtatgccccggacttctttagcccaaacttccttgggaaaaactttcttgtaacagccagtaccagatgctataatattttagaagattgaaaggaggtagccccgtttatgaatgaccctgtgctgacgctgcgatggtttttaaactgccctgaaattgataatctggaattcttcggagatgaggactgtctgggaaatcccattaccggagtcaacgtaattgacaatccggaaggcgtcccctggattaaaaaaaacgaactggtcctgacgaccggctttattttttataaagacattgcactgacaaaaaagctgctaaaggagctccacgatgtcagctgcaccgcgctgtgcataaaaataaaacgtttttacgacaccatcccccagtttctcatagaagaagcggccaggtaccgccttcctctgattgcagttcccttctaccacagttactctgatattatgcgtgtcatattccgtgaactggaactgaggcagctctccaaccaggcctttgtcatcaatgaaacccgcaaattttgccagcttttcaccagcaacagcggaatcagctccatgctgtccatgctgtcctcctacacggattccatcattctgataaccgactataatgacaaatccgtgtatttccatattccggattcctatgccaatctcctgcaaacctccagccgtgtagtgatccggcccgataaatccaagaatgcagagagcggcaaggaggctgacagcgataaggaggcttccaatacgcgcaggttctggatcaacaaacaaatcataccctttgccgtttttcctatccccagcggcaggtattacctctgcgctgacattaacgctgcccccctttcggatgacatagtctctatcatcacaaactgtcttcccatcctgtcaaccgagcttgagaccattcaggtgaatcagaggcgtttttcctccaccaaccactttgctccttttttctccatgctgtcggacatgcgttccaagtccagcgaagaaataaggatagtgtgcaatacctactcctttccctatgactgcaagcgtgtctgcattgcctacgaaatccagcagacgggaagcccggaacggctgatgcgcacggtatacgataaattcagcactgctctggaaaattcgggacagcagtacttcctgagtttttacaatgattatgtgattgtatttctgttcttccagaaaagcatctccaacctggaggcagtgaaccaggcacagatgacagcggaatacctgtaccaatctttggatgagagcctgcgccagtgggtgcggggaggggtcagcagaagccacagccgtttggtgacaatcggcaccgcatttgaggaaagcttaatctccatcaatatgcagtcccacctcaatccccaaaaggctgtggcttcctatctgcgtcagattccctatcatctcctgaggaacctgaaccatcacgacctgaataaaatatataacgacaccatcgtccggctggtggattacgaccaggcaaacggaacctgcctggtccacaccctgcgcatgtacctggaaaaccgtatggtcatccgcgagacctccagacagctcttcatccaccgcaataccctggcagaccatctgaatctgataaagcgtatactaggcaccgatttggaagccatggacgaaatcttcagcttctatctgggactatgcgcctacgatctgctcagggaaacataacataagcctgctatgcatctttgcctaatgtctggaggtggttcatattcccatacagcttcctgattcttgtaaactcgtcctcatcgtaaaagctgcattcccctcttgcataagcttttgctacctccagcataaatctggcggcctcctcacagtccgtgatatgggtggctccggtagcacatccagccaccggcacctctgtggtgatggctactccgataaccggcgcctttgttcccgttgcaggctgcaggatgctgtttaaatgatacagatcattgccatagggcgtaatatcctggacagacagggcatatacataggggagccgcccggtggtggtctgcataatgtccagaacggactcagacaccttcagaatatatccctccttaaccgtaggtgatatggcgaatccccttgtgttgataatccggttccccttggtagtgtcaacagacaggaccgcgtcaagctcatcactcagctcttccttgttgacctgggccatctccacaggtgaatccataaatgccaccggcttgtggggccttgtaggcgcgtcgggacacacatgagtggatacaatgatgtcaccctccagtatgtcgcccttattctgcatatccaagagctttgcagccagggataatgccaccagggcgccgtcgccgtcagacacgaatccgattcgctccggccttgctcccaatcctcccaggcgtcccaaaagccccagtgtgggagcatctcctccggacgtctttcccctgcttccgtgaatcctgactttgaccatatcggtttttccctttggcccaacgagcggatatacgtggatatccgcatccttcctgattcctcttaagtatgcctcaaccgtttctccgctggcattgctgtcatccagaacatcatacacttccaataactgtttgattaacacgacatatctcctcctggtatttattcaattcccattaaatcgcacaccgctgccacatatgctttggcggcagtcaccacatcttctatctccactgtctcattgtaagagtggatccccactgtattggacggcccgaactggatcgtgggaataccctgacgccggtaatccctggcgtcgctggaagcccactggtaagcaggcaccacctgagtacctaaaaatgcctccacattcttctttaccgcaaggaccaatggatcctcgtgatccgtaaagtttggctcggagcggtaattcagctcaaaatcaaccccatccactccgctctccctgcgtatctcctccacgcaggcagcaatctcatcctggctgacacctatgggcagacggcagtcaaccactgcctcgcagcagtccggcaccatattgtggcgggttcccccctgtatcagtccgatattggtggttacatgatctatgacacttcccaaacccggaatctcattcttatcctctgctatcatctttgagtctgccagaggctttaactgcctgtctgaaaaatgcccgcttatcctggtaagcttttctaccagcggaaggacctttgccatcttaaggattgcattctctcccttataattcccaagacttccgtgggccgccttgccatgggcccggattgtcagcagcattccccccttctggccaatctcaatggtagccatggaggtgggttccgccaccaggcatccgtttgctcccttggcgtatccgtgctcacacagccacgcagagccgtactccccgccgctctcctcgtcggaaacaatgtgaagccgtatatttcccttaaggcagacattggactcttttaacagagccatggcaaaaaggactccggccaccccggccttcatgtcggaggttcccctacccaatatctggctgtcagtgaccgtaccgcagaaaggatcaaaatcccataaccctcggtctcccgccgggactacatccacatgtccgttaaaaatcaggctgtagccgtcatcgctgcccatcctggccaccacgcagggataatccgggttttccccggtttcctcataggcaatgccggccttctccagatatttctcaacaaaatccaccacttccctctgggttcctgtgggattctcactgttaatcctgataagccgggaaaccaggtcaatcagttcatctttccgatcttccaccatgctgattaaattttcttttctcattttttcctccgtcagtcgcgttcgttctgatatagaaaacaggctaccatgtggtccgtgtccccgtggggcagcagtttcggcagttcctccctgcaccgcttcatacaccgtggacagcggtttgcaagagggcatcccttctgttccccaattgggctgggtacctcaccggtcagcacaatgcgttccttttcctcctccggggattccggcggaatggcggacaaaagtgcctgggtatacggatgcaggggattgtggtagatagagtcactgtcacacagttccaccagccgtcccagatacatgatggcgatgcggtcgctgatatatttcaccacgctcaggtcatgggatatgaaaatatatgtaaggttaaaatgcttttgcagcttcttaaacaggttaatgacctgggcctgtatggacacgtcaagagccgataccggttcatcgcagatgaccactctgggattactggcaatggccctggcaatgttcagcctttggcgctgtcccccagaaaactcatggggatatcggtttaaatgctgcatatcaagtcccacttccttgaacaggcctatggtcctttcctggcgttccctggcagtggcaggcgtcttgtggacaatcatgggttcctccacggaatccgcggccgtatggcgggggtccagggaagaatagggatcctgaaataccatctgtatctcccggctcagggcctggcgctctttcttcctgagacggttcagctcttttccgtcataaaccagctttcctgatgtgatgggatggaggttgaccaggcagcgtcccagagtggacttgccgcagcctgactcaccgatgatacccagggtctcaccctcgtagatatccaggctgatgtcggaaagggcgtgcagctttaaggccttgccggtaaaagactttgcttttatgtcaaaatccttgcacagatgttcaatcttcaatatcactttcctatcttccactttccgtcacctcatttctgacaagcctgtttccgcctgtctgccggtggcaggcaacacggtggcctggcgatacttctgtcagctccggcacctccgtcctgcaccgctcctgcgcgtaagggcatctgttggcaaagttgcagcctaccccggtaagcctcaaatcaggcggtgtgcctgcgattgtggacagttcctccttagaattgctgctcagtctgggcatacagtccaaaagcccccatgtataaggatgaaggggatgattgtataaatcaatacagggagcatactccactgtcttgcccgcgtacataacaatcacgctgtcacacatatcccatacaactcccagattatgggtaatcagcaggatggctgtgccgtatttgtcgcgcagttcctttaataaatccagtacctgtgcctggaccgtcacatccagggccgtggtgggttcatccgcaatgatcatctgcggtttgctgcacacggacatggctatgataaccctctggcacatacctcccgatagctcgtacggatacgcctccatccgccgtctggcatcgggaatcccaacccgtttcagcgcctcctctgccatgttcctggcctctgccttggtgaccttctggtgggcgcatatcatctccaccatctggctccctaccttaaagaccggcgacagggatgtcatagggttctggaagatcatggatatgtccttccccctgaattccagcagttccttctggctcagcttaaggacatccgtaccattaaaatcaatggacccgcccacgatttttcctgtcttggccggcaggagatggatgatggagctggacgtaacgctcttgcctgaacctgactcgcccacaatgcccaggatttctcccttttccacctcaaagctgactccgtccacggctttgctgactccgccggaggtatagaagtacgtcttcaagtcttttactgtcaataatttctgtccttccatatcctcacctctcattcatactgcttcttcatatcctgaaaggccctgtccacctgttccataaggctgtcgtcggataaaagctccaccgcagtcatggcaagtgccttggcgccagtcagggccgccctgtgtccgtccggacttttgcaggcatcttcgaattcctttgtgtgtccccggagcaggggaaccacctggacataggattggagggccggaaaggcatgggtcagattacccacatccgtacatccgattcccagttcctttcttcttggcattaccgtttctcccagccgggtaaattgctctgccagaacgtcctctataaccggattgttgcgtatgtcctcatatgtgtagccgtcttccttccactgccaggtagtaccggtcatcctggctgcggcctcgcaggcctccagaaaatctcccaggagcttcttcttggtcttcatgctgaacgagcgcactgtaaacttcccctggcagtgttccggaatgtggatggggtcctctccgccttcggatatgatacctaaaatagttccctgcccattccagcgaagcctcatctggctgatatgctggaacagcagaagaaggggatccagggcgctgacgccctcctcaggccaggtagcggcatgggctccctttccgaaaaagtccacgatgatgtctgtcctggagtatgagatatcattcaccactgtctcattggcggaatggattatcatagccgcgtccaccccgttaaatgccccattttcaagcatgatgacctttcctccgccgccctcctcggccggtgtcccgaatacggaaatactgcccttaagctgaggcagcacggacttcaccgcaatccctgctccggccgacatggccgccatcaggttatggccgcacgcgtgacccattcccggcacagcgtcgtactccgccaggaacgcaatatgaggtcccggctttccggaatcacaaaatgcatgaaatgctgtctcaatcccgccggttccccgctccacctcaaaaccgtgcttctcaagcagtccggtaatggaccggcatgccttatactctttaaaattatattccggattgttccagatggtatctgccagctccgtaagctccccggaacatcggtctatacacgtcccgacctgtcttttcaattcttctctcatggctacctcctcatcttgggatccagtacatcgcgtataccgtctcccagcagattaaagccgataactgtcagcaaaataaagcagcctgagatacctgcgatatggggcgccgtgttcaggcagtcccttcccgacctcagaatacttccccaggaagctgtgggcagcttgatgcccagtccaaggaagcttaaggatgcctctgatatgattgcgctggcagtgttaagggtagcatacacaatgacctcactcactgtattgggcagtatatggtgaagcagcatcctggtattggaaatgccgatgaccctgcctgcattgcagtactcctcctttttcactatgagcacctggcctctgaccaccctggaaaagcgcggtacaaccgcaattccgattgccaggatcacattgaatataccatcccccagtaccgtcataaggataatggacagcaggataaaaggaaatgccatgacgccgtccatgcagcgcataatgaccgcatccaccacgccgccggcgtaacccgatataagtcccagggctaccccgatgacacctcccagtaccgtggctcccactgcaaccagaagagagaccctggccccatagcatattcttgtaaacaaatcccttccggcttcatccgtgccgaacaggtgccccttctcaaagaagcccagatatgcgtcaatgggatgtatctcattgggctttccccctgtgatgaacggggcaaatacagcaatggcggtcataatcacaatgatgaacagtccaatcatagctgtcttattccgtctcagcttattccaggcgctgttggccctccgttccttcctgaggatctcctcgtaagacggttgggatgcggctatatctgtctttttcatttagctacccccttcgtagctgactcttggattgatcagcatgtatacaatatctaccgccagatttaccaggacaaatgccagcgcgattacaagaacagcgccctgaatcagcatataatcacggttgtcaatggcgcccaccatcagtgatcccatgccgggccaggaaaacacgttttccgtcaggatggcgcctgcaaaacaggatgccagctgaaggccaaggactgtgacgatgggaggaagggcgctctttaaagcgtacttccatataacaatggcgtccctgattcctctggctctgatggcccgtatggaatcgcttgaaatggattccaggatactggaacgggtgattctggcaaaggttgccattggtatggtggacagacagaaacagggaaggaccatgtggcgtatcacatcccccaggccgttttcaaaggttcccatgcccagggccggaagccacccaagccggacgctgaaggtcagtaccagcataaggcccatccagaaaataggcatggaaaccccaatcagtgcaagtatcataaatatgtaatcaaacagagaaccctgctttaccgcgctgaccacaccaatcaccatgcctatcaaaagcgcaaccgctatggagggaattgccagcagaagtgtattgggtatcctctccgccacaagctttaagaccggctggttgtaggaataggatgtcccgaagtccccctgcaaaacgccgaggacatagtctttgtactgaaccagcattggttcgttaagccccatgctttcccgcagcttttccacgtcctgcacggaagcctggggacctgccacggcccgggccgggtcacccggaatcatcctcgtaagtacgaaggtcagggtcaccaccacaaacagggccggtatgatctgcaggcatcggttaattaaagtctttaacatagatgtcaccaaactccttttgagacaggaatgccgccataagacggcatccccggtgccggttccatcaagccggtactgatataataccgttgcttgcgaaccttactttgaaagccatacgttaatatcggttgtacagatctttaccttgccgtcagccctctggaccagtccctggacattgggcgtcacaccccactccacattctcattggcatagaatataccgggcatatccttcacgatcagggctaacgccttcttgtacaggtctgcgcgctcattctggtctgttgtcagcagggcgttctccaggcatttatcaacctcaggattattgtaaccctggccgttgcccagggaaccgatttctccgctgtagaacagcttgtttaagaagaagtagggatccggataccatgtccatgacataccaaacacatctgcctgtccggaagcgccaatctcgctgaaggttccccactcactggtattaatgtttacattcacgttcaggttctgctgcaggtatgcctggaacagggttgccatcttaaccctggtaggcgtattggaaatatacaggttcaaatcaaatccgtccggataacctgcctctgccagaagcgccttggctgcttccggatcataggttggaacctctgcctttacagcctcgtcgtatccccaggagcccggaggcagcggaagggatgcaggcacagcctcgccatactggtacacgccgcctgtcagttcctccacgtttacagccttgatcagggcttcgcggaccttcggatccttggtaggcccatttaccatgttaaagtacaggtaggatacatgaagccccggcatctccaaaagcttgacggtgtcatcatcccttgccacctgcacggcctctcccgtaaggctggtagccacattgacctctccggtcctcagggcattcactgcctggtttccgtcgctgacaggacggaataccaccccgtccaggtgaggcttctgtgcccagtacttttcatttctcaccagggtggcctgctggtccagcttgaattccttcagcgcaaatggaccgcttcctaccagatgggttccgaaatcatctccccatccctccacttcctctttggggacaattacattgcccgcatcggtaagggcagtaaggaaaaccgcgttgggattttccaggacacatttcacttccgtatcgcttatcacttcacagtgatccaacatgtccagcctgttcatagcagacagctcatagaacgctccagggaatacttgatatcctctgccgttacctgcctgccgtcctgatactgtcccggctggaaatacacatcatccctcagcttgaaggtatactcttttccatcatcgctgacctcccaggaagccgcgatagagggcatgatctcagtcaggctgctgttatactccaccagtgtgtcacatacgcttccgataatctgtgattcatatgtacctgtatatttcacaggatccagatttttaggcgatgaggaaagtgatattgtcagtaccccgccgtccaccggctcaccggcatcagcggtctgtgtctccccgctggcccccgcttccgctgccgtggtccctgcgggcgcgctgctgcctgcattttctgtgccgccccccgaacttttgccgcacgctgccatggatacggccattgccactgccatcaggcttaccatccatctttttttcataagttattactcctctctttttttgtttttgctgcccttttgtaaatttttataaaaaaaacgatagtcaaagcaaaacatagtcccctttaactatcgttttatatcttcaattcggatgattatttaaccagcatatggcaacctctgcatagatggccgacattaccggtatcatgtcctcgctgaatgtgactttgggattgtgcaccccgtaaggatatccttcctcctgcgaaccggttccgacccagaaaagcacactgggcacaagctgtgacagtaccgaaaagtcctccgaaccagtcatccttggcagttcataacaggttcccggtcccagcaggcggtcaataaatcccgctgcctcttccagaagctcctggtcatttaccataggcgggacaccggaatagagatattccacccgggcagatgccccaaaagcggatgccactgttgacgatatttcctccagacgtctcctggcatattcccgcaccttctggttcctggtgcggatggtgccgcgcataactgccgtatcggaaaatacattggctgcggctcctgaatggaattcgcagattgtcagtaccagcatttcatcgggatgggtttcccggctgtttaaggcctgcagggccatatggatatgtacggctgcgttgatagggtcaatgcagctgtccggaacagccccatgtccgccctccccgtgtatggtgattgtgaacacatcactggacgcacaagccgctccggtactgtatcccacactgcccatactgtgatggaccacatgcagggccatggcgccgtccacggaaggattttcaagaacgcctgcctcaaccatgtcggcagctccgcccacatcttcctcgcagggctggaacatcagcttgacccttcctctcagctcgccttcccgctcttttaatatcctggcagctcccagaagggcactggtatgaatgtcatgaccgcaggcatgcatacagccgttattggaggcaaacgtgagaccggtcaattcctcaaagggaagggcgtccatatcagctctcagaagaaatgttttcccgcccgcttcagcgttaccaagaaccgcgctgattcccgcttttcctactttcttgaattcaattccatatgcctttaatttctctgccacaagggcagttgtttccggaaggtcaaatccaatttcagggttttgatgaattttccttcgtatggcgatcagctcatcgcttaattctccggcccttgtaagggtatacctgttatccatgatattcatgtgtcctcatccagaatctaaattatttattttaatcatcatatcaaaactgcactatccttacaattgcatcatgcatgatatttaagttttttaatatgcattatgcatgattctttctgtttttgtcgtctttgtatacacttatgtccttggtgtgcatacatttttgtctttttgccttttctcagctcacagtccggtctcagatatctgacaattccgatatcacccgggccgccatggtgcgggaaagaaccactgtcttccctgttttttctgcaacctcccgcttcatggcaaaggaatatccgatgcagtccatgacaaccagaggcccctgaagtgcgctgatctttctgcatgcctgttctatttcctcccatcccccgtacggggaagccgccaccgtcaccacgtcgtttacatatttcctccatttttcctgggactgttgtacctgtctctgggtgggtgtcaccacaatcagctgtctgtccccgcagagaacaggaatcagccggcttataaggtcgcaggggaatataagaggaacccgggatttgaatttatagtcaaactcacccgtacaaaagaacagaatcatcttgactccctctgcctccagctgttcgatacactcctggatacgaggcaggatcttctgctcggaaaacgaaacctggctgccgtcccgcatccgggagaccaggacatactcccccgcatccggggccagtttgtctatatcctccaccgtcaggccatccaaagccccccgttccagaatttcaaccttcccctggaatatccccataatgtcatctgtcacgtctgtccttggagactgccccactgtaattgcgcctaatttaaacatctcttttctcctttccgactgctgtataatgttgattctaaaagtatagcatactactgtcaaataaaatatacggcctgaaaatggtactaacaaaataaccacctgttcctgaggccataagcccggcattgaaaaaaggcatccctgccatgttgtcatggtcctggatgccttttatcatatctggctgagtataccattttgtttaaaactaattcagcaaagccccataccgccccaaaaagctctgggtcctctcattatccgaagcaaacacctgctccggcgtgccctcctccacaatgacaccgcccgccatgaataccacgcggtccgatatatcccttgcaaaggccatctcatgagtaacaatcaccatggcgatgtcaaggtctgccagggacttaatcaccttgagaacctcaccggtgagctccgggtccagggctgaggtgggttcgtcaaaaaacagtatcttgggattcagcgccaatgccctggcaatggccacgcgctggcactggccgccggacagctggcacggatacgcattttccttgtcctccagccccatctttttaagcagtgccctggcttcctcatagacctgcgccttatcccttttctgcacatggatgggagcatccgtgatgttcttcataacagagtaatgggggaacaggttgaaattctggaacaccaggccgtactggctctggatttcctttaaatccttttttgaggcgtacacggcccttccgtcctctgtccaggccgcccgctttcccaggtatatcacttccccgctgtccatggtctccagcatggtggcgcaccgcagcagggtggattttcccgaacccgaaggaccgatgacagaaacgatttccccctcctccacactgagggatatatcctttatgacgcccaaaccgtcaaatgacttttccacatgatttaattccagcagcttcataatccacaatcctcctgttcctaacggtaataatccatcttcttctcaacccactccattccaactgccactaccaggttgaaaatgtagtagaacagaccggccgccacaaagggaatcatattggtctgggacgccgcaagggccttggctatggaaaacatctccgccacgctgagggtaaaggccagggaggtgtccttgaccagggtgatgacctcgttggtcacagacggaagaatccgtttgatgacctggggcagtatgattttgaagaaggtctggaaccggctgtagcccagaatctgagccgcctcgtactggcccacaggcatggactggatgccgcttctgtagatttcagcaaaataggcagcataattgatcacaaatccaatgaaggtggcccacagccggtagccgctgcccaccttgatgcggaacaggtaataaggtccgaaatacaccaccataagctgcagcatcaggggcgtgcctctcatgatggatatgtataccttgacaacggcctggagcagccggtttttggacatacgaccaaaggccaccaaaaggcccagagggagggaaaagataagcgtcaccaggaatatctggatactggttcccatacctcctgccaactgaatcaacatctgctggattgtcattttacccataacttcttacctgcctttaacatttatgccgtataaagccgctgttaaacaagctgccgccggattatccggcaggacagcaggtccagacagcggcctttattacttgccaatcgtagttacgtcctcgccaaaccacttctcggatacggacttaagcgtgccgtccgcagccatctcttccagggtggcctgtaccttgtcgcgaagttccgtgttgcccttcttgaatccaactccgtactcctctgcggacaggctgtcctccaggataatgaagtcagcgtttctctgctgaatctgatatccggccacgattacgtccatggcaatggcgtccaccgcgccctgctccaaatccatgaaagccgagttataatcagccgtggtaagcagctgcttgaaggtagccgtcaggtccgggacctcctttaacgctgcctctgcagaggaatccacctggcactccacaatcttgcctgccaggtctgcctggctggctataccggaatccttagccacaacaaatacctgggtgttggccatgtacggctctgaccatgtatagtcgtcctcacgccctgtcatggtaaatccgttccagatacagtcgatattgcctgcctccagctccatgtccttggaatcccaggcaatgggctgtgccgtatattccagtcccagacgctctgccacttccttagccagctccaggtcaaatcctgtatattcaccgttgtcccccatgaatcccatgggcgggaaatcctggtcaaatcctactatcaatgttcctccggcgctttctgaaacagcctctgacgcggcttcgctctctgcttttgtctcctcctgcgcggtggtatcctcagccttggcagaagtgtctgctgctgtctgctctgtttctgcctttgtctctgcctctgtggctgcttcctttgaaccgccgcatcctgccagggataatgccatcacagatgcaagggccaggctaaaaagtctctttttcataataaacgtcctcctcttattccgctgtttcaagtccagcggctcctcacggtcttttgacacgctatcatattagcacactaaagcgtttgtgtaaaggacattttatatggcaaaactgacaaagatccgcgccgctgtccccctccccaaaattcagggcagaacaggagcctgcaaaagattcataagctccttaaggctccccacttcataatccgcccgtatgccctcaggcagcgtctgtccgccggggttataccagcacgtatacgtgcctgcggccattccgcctttgatatcggacgcaggtgaatcaccaatgagcagcatacgccgcggattggcatccggtatcctggaaaagcagtaatcaaaatattccttctgcggtttctggctccccgcgtcctcggacacaaaaatatccttcataaagccgtccaggccggaggcagccagccgcttgtactgggtggacgatgtcccgttggtaaccacatataaatcatacctgtccttcagataggcgcacagctccagggccccgtcaatcaaaaatgcggacgcgtccagctgcctgcggtacagttcctccgcctcacggccgtccaccgccctgcccagacggccaaaaaacgtctcaaacctctgccgtaccaaatcttccttggtcacttctccccgctcaaaggcggaccagaatccctcattgatttcatggtacagcaaaagccgttcctctgtgggctcaaatccatactgctcaaggaccaccttcatgccctgcttctcagacatgccaaaatccaaaagcgttccgtccacatccagaagaatcacatcaaacttccgttccctgatctccatagacaatccttcctttgcaaaccgtatacattaccttgcccgtcaatgtggcgcccagaaaggggctgttggatgacttggattcaaagccttccaccgtccactgcctgtccgcatcgaaaagcaccagatccgcaggcgctcctgcttccatgcgtccgcagtccagcttatagagcctggccggattatagctcatcttttccataagctccaaaagcgtgagatgtcccggcttcaccagattggtgattcccagggccagggcagtctccagtcccagtatgccgctgggcgcctgggtcaggggccgatccttttcctcccggctgtggggagcatggtctgtggcaatcatgtcaatggtcccatccttaagcccctcaatcagcatctgcctgtccttctctgtccttaacggcgggttcatcttagccagggttccgtgctttaacacggcttcctctgtcagggtaaaatggtggggcgtcacctcggcccatacctttgcccccagcttcttggccaggcgcaccatctccacggagtgccctgaactgatatgctggatgtccacggttgcccctgtatccagggctatcatgcagtccctggccaccagggaatcctctgccagggctggtgagccgtagattcccagttcatcggaaatcctgccgtggttgattccattttccctgataaactgcttgtcctcctcatggaagctgagaaccgtatccaatctggccgcttcctccatggcctccctgacaaacgtcccctccatcagcggaatcccgtcatctgtaaatccggctgccccagctgccagaagtccctccatgtcggtcagctccctgcctgcaaatccctttgacacagcggcgcagcttaacacatggatgcctgtcttttttccctcctccagcacatagcgcagggtctcctcgttatccacaatggggttggtattggccatgcacacgaccgtggtgaagccgccctttgctgcagcccttgcccctgtatggatgtcctccttgtacgtgggccccggatcgcgaaaatgcacatggacatccaccagtcccggcgctgccgccagtccctctgcctcgattatctgctcatactgcctctcccgggtgctaaagccgggtgctccctctgctcccccctggtccgccggaaatatcccggcaatcctgtctccgtccaaaaccacatccgcctttatatccagcccttctgcgggtcccagtacccgtcctgcgcgaatcaaaatcataatctgttcctttctttaatcccatctgtttcaccaatccatgtccggtgcagaccgaaaagcccggctcccgccgtccgcctgtcacaccaggaattcctctccccgtctgtgtatctcctgtatcctgtccttgtacccgtcggcgcaggccagggccttaaatctggcagccgcctgaaagtcctcccagaaatgcatgggaaacaccacgtccgcccccaccattctcataaagtcatccattcccaggtaaaaatccttctcctgcctggggtcaatgagcataaaggccacatcaatatggcgtcctgccagcttgtccatttcccggtggaaattctcactcatcctgcggttgtcggcctccggctccccttcccatacccaattgtttaaatcccctgcatggtaaatggtcctgccctccaggctggccaaaaaggccacaccctggtctgtggacttaaatgcccggatgtccaccggattcccggctccgtccttcaggctcacttcctcccctggtcccaggaatatggttctgcccagaaggtcctccggcacctgccttgtccagatatcgtcggacagcacataggtcacattcccgcggctttcctccaaatcaaatatggaacgggaaaaatggtctccatggcggtggctggcaaacacaaacaaaggcttctccctgtctgtttccggaatgtttccttcaaaatagtcaaacagaagtacggcatggtcaagctccgccataaaactgctgtgatggatatacgttatcttcatatcggtcatctcccatccgttcttatatgtctaatagtaacataaacctcaattcccgtatagttattttatcccgttttccatttatatacagaaacaggcggcgccctccggtttcaccaaaccggtccggcgctgcccaaaagacaatacattcttatttttcccaaaattacagggcatgataaaaggttttccatttcccgctggcaaaccgccatccaaagaaggcggatcggacactccagtccgcaatcatggcccaccacacgcccacggctcccatgcccagtcccactgccagcacatagctgaaacctatgcggaacaggagcatggacaggatggatacgcacatggggaacttcacatcgctggcagccctcagcacattggccagacagaaggaggacggccataaaaacactgcgcacccatcatgaatcagcaccagtacggctcccagttccaatgcttcttttgacagtccatatagactgagagaaagcggcatagtcaatataacggctatacagcaaagcccgttgactaagtatgtaattttcatcattttttttgcataatatccggcctggtcaaaatcgcctgcccccacgcagcgccctaccacggtaatcatagccaggttcatggcctgcccgggcagtacgcccatcccgtccagattattggcaatggcgttggcagctatctgggtcgtgccgaacatggctatgatccccaccaccagaacccggcccagctggaagatgctgttctcaatcccattgggaatgcctatgcccagtatctgcttcaccattctgaaattaagattccattttcccccaataaagatgtccagattcttatttttcagccggaaaagaaggataaaacaggcagtcatacgtgaaatcagggaagccgcagcagcacccgccacaccccaatggaatacaaagatgaacagggagtcccctataacattgataatgttcatgatgatggacgcctgcatggatatcttggaatttcccatggagcggaacagggcggcgcaggaattatacacggccaggaaggggtaggacagtgcggatatggtcaggtaaaccagggcattggccatcacatccccggccacgccgccgtagagcagatgcagcaccccccggcgaaacaggatgcagagcaccattataataagtgaaatacatgcagttatcaaaatcagctggttggccgactggcaggccctgtcccttctccgctgtcccagatactgggaggacaccaccgcgcctccggttgccaccgccgcaaaaatattgatgaacagggtgttgaccatatccaccagggaaaccccggaggtagctgcctcccctgcgtttgataccatcatggtatccaccattcccacggacacagccagtatctgctccacaataaggggcagtataaggcgcttcaaatcctggttggtaaacatacggactccggctccattttgttccatcttacatataccatcctttgtatcccgctcatcttcatacggcacgatgggggatgttttcttaaaaaagcctactccccccgccattccccgtcaatccgtaatttacccaaaaatatcagacaatcaaacagtctcccctgccgctttccacaaatccccaggcttcctgaaactacagcccgtaaaacaggggcgatcccggccccagcggcagacctgtcagataccagacagtgaacatcacaatccatcccagcaaaaaagcccctgaatacggaagcatggtggagattacgctcccgattccggcgtccttatcgtatttctggaaaaacgccaccgtcaatacgaaaaagggcatcaggggagcaatgatattggtactggaatccccaatcctgtacgctgcctgggtcagctccggtgaaagacccagacgcatgaacatggggacaaaaatcggcgccatgatggcccatttagcggaatccaccgctatgaagatattgataccggctgtcagaaggataaagcagacgattaaaggaagtcccgtaagccccacggattggaggaaatccgcccctttgacggaaataatggtgcccaggttggaatagttaaaacaggctgtgaactgggccgcaaagaaaatcagcaccataaagcctgccaggccgcttatggacttattcacaagagccaccgcgtccctgctgttcttcagggtgcccgctccgataccgtaggccagaccggggagcaggaacaggagcatcataaagaagatgatgccatccataaatggggaattgaggagtgaatgggtttggggatcccgcagcagtcctccgggcaaaaccgtcaaaagagccataaccgccgcatataccaacaccgtgatgccggcccagcccattcctctcctttcattttccccgatatccccaatggtccctgtctccacaggcccccaaggccccagacggggctccaccagcctgtccgtgacaagggtgcctatgactgtgataagcaccgtggatgccaccatgaaataccagttgcagacgggaagcactgtatattccgggtcaatcatgcgggctgcctgggtggacatgcctgcgaacatggggtcattggtgccgattaaaagattggcgctccagcctccggatacacctgcaaaggctgccgccagcccggccgccgggtgacgtccaaaggccgtgaacaggaccgcgcccagcgggaccaggaccacatagcctgtggatgaggcaatgttggacatgattccaagaaacaccaccacggcggtggctaatgactttggcgtggaggaagccaccctgcgcagcagggcagacatgaagcccgtaccgtccgccacccctacgcctatcatgatggtaaaaacagttcccagcgcaaaaaatcccgtgaaattaggcaccaccgcggtgaccatataccggatgctgtccggcgccagaaggcttacggcctccactgtctttttagtaatctcaccgcttgtgcggtccagaaaatcatatgtgacagacaatcccaggaatccgcacagggcggacacaaggatgacaattcccgtcagaatcaggaaaatcactgccgggtcaggcagcctgttccccacccgctccacggtatccaaggctttcaggaccatgctttttttctgcccatcatttgccaaaacaattcctcccatcatgtgtattctatgtccggccaaattcttattgcggccatattctatatccggtttatcattcccttctttaccggcttatattacattctcatattaactatggagcttcggctaaaaaacagcggctgaagcctttgtcattttgacagtcgttttttgccagtctattatatttattggtttatagcacaacaagatcaactgtgtttttgcgtcccattatacactttagataaaaaaattaaaaaatctttccaagttgccgtcattgtttcaaacagctttgtgccttaaaatataagcatacaggacatgggaacgtgaaacgaaatgttagtacaggaatcagcacaagaaagaaaaagaagggaaaagaaaagggggaaacaatggagggaaagaaaaaagggttgtctctgacaacacaaattctaatcgctacagcaggcggtattgtctttggatctctgattgggccatgggcctcaaatttaaaatttatcggtgatatttttatccggttaatccagatgtcggttgtactgctggtaatgactgcagtggcaggcgcggtgggaagcggagacggccaggatgtaggaaagatggggttccacacatttaagtggattatctttttcactttaatatcagcaggactgggggttgttctgtccatgctcatacagcccggcatcggtatcgaaatcgccaacgcagaggccattgccaatgcctccgctgaaacagcatcgcttcaggacacgctgttaggctttgtatccacaaatatcatcggctccatggctgacagcgctatggttccatgtattgttttcgcattgttttttggcacagccatgggtacatatacacgccagagcggcaacaggaacatggttgaatgggtaactggttttaacaccattattaccaacatcataaaggctgtcatgcatgttgcaccaatcggaattttctgtctgttggcaaacgttgctggctccaccggtttcaaggttattattcctatgattaaattcctgggagtattgctgctgggagacgcaatccagttccttatttatggtccgctgacagctgctctctgtaaagtaaatcctgcaaagatgcctaagaaattcgctaaaatgtccatgatggccgttaccaccacctcaggcgcaatctgccttccaaccaagatggaagatgcggttgtaaagttcggcgtaagccgtaaggttgcagattttaccggacccattaccatgtccatgaacagctgcggcgcagccctgtgttatgtggctgcaatcttctttatggcacagtccaccggaatccagctgaccacctatcaaatgggaatggccatcctgctttcatgtctgatgtgcatgggaactatcgttgtgccgggcggttccgtaatcgtgtataccttccttgcctcctcactggggctgccgttggaaagtatcgctatccttattggtattgactggttctcaggaatgttcagaacacttatgaacgttgacgttgatgtcatggtaggcatgcttgtatccagcaagctgggcgacctggaccgggacgtgtataatgagacgaaggtagtaaaatattgattttcagttaaagattgtcagcagttaaaataaaaaacaggagcgtgtctgacgctcaatcctcccacggttaaaccaaccatggaaagaatgagccgcagacgcgctcttttgtatttcactgcacatttcatcaaagcttctgtctatttcatcacagcttctgccttatggcctgctcctgttcatcaaaaagcaggtccttattgtactggtaatagcgttcacactcatattcatccaggaaccgcacacacgcctcgctggtattcagctccgtgacaaatatgaccatttcctggccggttccaaaggcagcttccatgaagtcaaaggcatgttccaggcggctgccgcaatcctccttcatggcctcatagcagtcgctgtgctccatgaattttctgcgcacccattcccaggcctgctcactgtcctcaacagcttcctttctcatctgctgggcatattcctccagcatgattcgcacacgcagccacaggcggtcctcccgccttcctgacagtccgcttttcttcctgtgaaggcgctccttctccagctcctgagccaggcaggacaaagccatggcaggcgattgggattgcgccgccgcgctgtttgcagaggtcttggccctgccgtccatctcctggcggtatctcttaagctgctccatcagaagttccatgaaagcatttttatcccacagtttcttaaatccttcagtcagcctggacaaaatcagacctgtaacgctgagacgctcatcaaagggcgccctggctacccggtcgcacagcgcctcacgtatggtgccctgcaaaatctcatccacctgatactcattctgatatttataatacagctccagataattggcaaaatcctttgcaattctggggtgctggatatactggctgatcacatccctgtcagctctttttcccaggctctcatataccaggatcagctgggataaatcctcccagccccttggggtggcgaacagctttccgtccacggttgtctctatccggcagaaattctgtcccttgatgctgagataggatataatggccggatggatattctcagcatatgcatattccttccacactgccaaatccggttccacgtcaatccgcttaatccggtccagggtgaccacatcgaattcccttaccgacttgttatactccggcggattgccggcagctgctataatccatccctcaggtatcttatggcttccaaaggtcttgcactggagaaattgcagcatagtcggagccagggtttcggatacgcagttgatttcatctataaagagaattccttccttaagtcctgtttcctccatccggttatagatggaggccacaatctcgctcatggtatactccgtcaccgcatactccctgtccccatacatttttttctcgatgaagggaaggcccaccgcgctctgtctggtgtgatgggtgatggtataggatatcagcccgaccctgcattccctggatatctgctccattatctgggtctttcccactccagggggaccgataagcagcaccggcctctgccggatggatggtatgacatactccccattctcatcctttaaaaggtatgcttcaatggtatcctttatttcttccttagcccgcttaatattcatgtcctgttctcctgctctgtgggataggcaatccatccctgtttctattgtccatgtctgttcctgctgtcctggtctgccggcatttccccgttcctgcggttctggtccgcctccgtatctctgttcctgctgcccggcctgtactccatgagctgttcctccttcagcaccactttcatagcccagggaggcacggattcatcggaaaacatattctcaataaacacaaaggccgtgtcgtaggaaggggcctgaaccggatagattcccttgccgtccgtgaaataaataagccccttgagagaggctgcctgacggcttttcttaagcccgttcacatattcaaatgccggtctgaaatccgttcccccgcttcctctaatctggaaatcatccatataagccttcagttcctcctggcttgtgaccagcacgtctgactgcaccgcgtcatcacactgtataatgtgtaaatggaccttcttaaaataactctcagtctcagacagcacgtcgtaagtctcttccaggaaccgcctcaccagctccccggagcaggacatggacgtgtcgatgacaatggcaaaatcctctacccggtaaacctctctggactccagcggctcgatgaggggcatattgccgtacagggacagtccgtaggtataaaacgcatagtcaaatgaatccggatccacctgcatttcttccttcagaaccgcaaacttttgaaggaaccggctgtaatcgtacctctcccggttttccacctgaacctcctccagcaggctccggttatcctcagacgcatcctttgaaccggtttccagctccgtctgcatcttctcccggttatcattccacttgttctgcctggaccgggcgattttaggactgtcctcctgctcccacagatcatggctgtccacaaagaattccgccttcagcatgtccaggcggcgttccggaagctccatctccaaaagggccctgtaaacccgctcagccgtcaggacaggacctttttccgacagagccttctcaagtctgagatatatttctctcctaagggcactcctcggcacatggacacatttttggtatagtccgtcaatgacgtactccatggctatgtcgcaggacaggtcccaataccccttgtccctgtcctttcgtgtatacatatggcagaacaggcagtggaacagcatatggagatacccgcggtttaccagcgtcctgcctcttttataaaggcccagcagataatccggcccatagtaaatcagatgcccgtccgtccccagtccctctcttgcccagtcagcctcaaagcccagactgctgagagacacatccagaaacttcatgttcacatacagctcacttctggcctgtaagagaatcctggcgcacaatgtcacctggtccagttcctccagctgccttttcctggtagggtctgtcatggctgctgccctgccgtcatggtctcatgttcttcctttaattcctggtacagatggtagaaggtccagtcactgttatgttctgtcagaactgccttcagggcaatcctgggcacgccggccctgcgcagtcctgccagcagcatgtccagtctctggcttgaaaactgttttaataccatgacctcctccggtataaccggaagctcacccggtccggctccggttctctccccatcagctccttgttccccggctccgtctgccccggcgctgcctcccgcagcctcatagccttccattccggcaagatatccaaccttttccaggacttgttccggtcctatgttccttatgcgcacgcccatgcggaccagcacgcttttcatcatagccacatgcttcattgtctccggtctgcccggattatagtacagtacagtctccatcatcttcaccatgtcctgccatctcctttcaacagggcctgtttacagccccttaccgcaccatgttgcgcgccgctttcccgccgccggttcttccgtttcctactctccaaacagctcctggctgtcaagcatcagggtaaagggtccgtcattgagaagctccaccttcatgtctgctccaaaacgccccttctccaccacatccacatgggtcctgcacctctccataaaatgtttgtacagggactccgccatctggggagcgcctgcctttataaagctgggcctgtttcccttgcggcagtccgcgtacagggtaaactggctgaccaccagaagttcaccctccacatcctccagtgataggttagtttttccattttcgtcctcaaatatccgcagacggcaaatcttatccgccatcttctcagccatctgccgggtgtctccgtccgccactcccaatagtatcagaaaccccttaccaattcttcccaataattctccatccacagtgacgctggcctgcgtcacccgctgtaccactgctctcatatgctattatctccttttatctcagcatcattttcagatattccataagcgtctcggtggtttcctccctgtagagtatctccctggcccgcaccggataatctgtgatgatattgtccacgcctaacagtttcatttgttctatctcagttttgctgttcacggtccacacatggaccgccttgcccttttcatgggctgcttccaccagcttccttcccacaaagctggaacggatgctgataaaatcaatatactcattgtcataatacgttccgtaggcagccgccagaatgtatcctgtcctcagctcaggagccatctcctttacccgctccagatatcccagcttaaccgacgtgatgacacactggtcctccataccgtattcccgtaccagggcagccacctgctccggcagactggaactatttcctatattcttaagctcaatgttcagcttcatacggcctttgcaggcttccagcacttcttccagggtgggtatccgctccccggcaaacctggagctgaaatggcttcccacatccagccggcttacctggtcataggtcatggtacccagcctgcggtccacccctgccacccgcttaaggttcaggtcgtggcacaccaccacaattccgtccgcagttgtctgtacatcaatctcactgtaatccgccatttcttccatggccgcctcaatggctgccatggtattctccggagccatccgggagcttcccctgtgggccgtcacctctgtctgccccagcacatcccagtcaggggatgtgccgttgtataccatatcgaatataagaaacaggctggctcccgccagcgcccctgttatggtcagtatccattttctcttaaaatgcagctcataaggcatggtaaaatcccagggcgctgcatgcgcgcttttcattccatactggtaatatatcacggtcagagccccaaagtccaccaggggagccaatatccctccaatgaacagcactaccacttccagtttagtacatacagctgccagcacagccatggccgcatagctgtccacaaacagggtgacaatcacggcagataccaccacaatgaccacgtacatgagaaccagccccacagccagcccaaaattcacaaccagcagcaggactactgccctgaggctgcgtccctttaaaagctccatgctccttctgaaaccgtcgcgaaactgcttctgctcaatcatacaggcaaaaaacaccagcatagtaggtatccctatgagcaccagggctgccgtcagcatcaccaggcccagccgtgccgccggcgcatgcatgatttcatacatgacaaaattcaggggctttatctttgtgagaatcctgagcagcagatagctgttcatcatcacataatcagccagagccagcgggagaagcttccagttcctccccttacacgcatcccatgccttgcccagcgcgccttttaaaatgtacacggaatccacccgcatggaataggccgcagcctggtaggcagtgataaggccccctatttccaccaccataagcaccatccccagcaccgctgccagcagggcgcagacaatggttgccgggcgcagaagaaaggcccccatattactcatggtcagataactgtatcctgccatgcgcaacgagaaccttaagagctggtttaccagcctgatatagaatgtacctgcaaccagccggaacaatacttcaaaaatcaccagctggcgcaggttcagtttaattacctggtctgtctcttttatcaatcggttcacttaagattcttccgacctttctttctgctccctggcaaatgccgtgatagcctcgttaagtgaaaacattttggcatccagtatatccaccatatcggcgcaggcctttagttccttcagcaggttctccggggcattgccctcgaacttatacgcaatcttgtgttccagactggcccagaaatccatggcaacggaacgaatttgaatctccaccttggtctccaccggtccatctgtgagatagaccggcacagttactaccatatgataactcttgtatccgttgggcttggggtttttgatatagtcctttacatgaaggacagtcacatccccctgagccgctatcatgccggctatctggtagatatccgacgtgaacgaacatataatcctgatacccgcaatatcgctgaggcattccatcatattctcaatggttacctcgtatccgtccttcttaagcttcatgacaatgctttcagctgatttcagtctggatttgatatgctcgatagggttatagtcataacggttcgcaaactcgttgtttaatatttcaatctttgtattgaccttttttagtgctgaatcatagagaaacatcactgaacgccattggtcaacctggtcgtccgctttggggatattggtcattcctatccctccttaccttaagcctagagtttaagcccttttaacaggtcgcctaaccctgtggataccgaaccggtctccttgtagtcaaatgtctcatgctcttctttgtctgcctgctgttctgccagaaccttcatactcaggctcagcttgccctcctgtgctgagagaatcttaacctttacggtctgtccctcggtcaggactgcgctgggatgcttgattctctgggtgctgatctgggatatatgaagcagtccgtccacgccgtcgtccagcttaatgaacgcgccgtaaggcttaatgctgtccacagtgccttccaccacatcaccggccttgaactgagccatgcgctcctttttctgcgcttcctttttctccttctccacctcgcgtccggaaagcaccagtctcttcttctccggatcaaccgtgatgatgacggcctccacatacttgccctgccagtcttccagtttctccacatactctgtagacagctgggatgccggaatgaatgcgcgcacttcctccagggatgtgaccacgccgccctttaccgcctcggcaatcttaaccttgacaacggttctgtcctccatcatctgagcgaactgggcccatttcgcccccgcgccgctctcctcctcggtaatctcgatgtgcctctggttcagtgtcttataggaagcctccagttcagccgcgtaatcctccatggtctccatgggtgcagcctcctttacctcttccgtcacttcattctccagctctttgttcagttcttcactcataattactctcctcgccttctgtacattttaccaaaatatattccttaccattataacaacaacccacctaatatttctatagttttatgacgaaaattataccttttttattttttatcctctttttacgccttttcactgtcctgaaaatatgatatgatgcattcagcggctaaaatgtctcaatgtacgctagaaaggacctgcattccatgatagatttactggacctgcacacacatacaacagccagcggccatgcctataattccctttacgagatggttcactcggcttcggtcaaaggattatccctgtttggatgctccgaccatgcccctgccatgcccggcagctgccattccttccatttcatcaatttcaaagtcctgccaaggaccctttacggcgtcaggctgatgatgggcgtggaactgaatattatggattatgacggaaccgtggacctggaacagagcgtcctggaacccctggactatgccatagccagcctgcaccagccctgtatccacagcggcacggcgcttcagaataccagcgcttacctgggggcgcttaaaaatcccctgattcatattatcggtcatccggatgacagccgtttccccatagactatgacacactggtggctgcagccggggaacaccataaacttctggaggtaaacaacagctccttaaacccattaagcttccgcgtgggagccagggataattatataaaaatgctggaactgtgcagacactacggcaccagcattatcataaacagcgatgcccactgcgaagcagacgcaggcaatcacggctttgcccacgcgcttctggaggaagtggactttccgcaggagctgatagtcaacacgtcccttgaccgtctgtgcggctttcttcccaaagcagccgccatcctggcccagcaggaagatgaacgctgcgggcacctgtaccggtcaggaaccatacaggaggaaaccgtacaggagggaaacgcttcggggggaaatgagtcatgattaatttcctgaacctggaatatttcctggtagccgccgaggagctcaactttacccgtgcagccaggaagctctacatctcccagcagtccctgagcaaccatatatccaacctggaaaaggaatttgacgtaattctcttcaaccgcacctcccctctgacccttacctatgcgggaagggccctaaagaccagggccagggagcttttggacctgcgggatgagacctacaaggaaatctccgatataaaggatttctccacaggacagctttccatcggagtatcccatacgcgcggcagggtcattctgccggaaatcctgcccacctaccagtcccagtttccgggcatcgagcttcatctggcggaaggaaattccagccagctggcctcagacctgctccatggaaacatcgacctgatgattgacctgctgccctttacagcggaaaatgtggaaacagttcccatttgtaatgaagagattcttatggtggtcccggacgagacactgaaaaaagcatatcccggccaggtggaggagataaaagaaaaactccgagccgcctctgatatccgccttctggaacactgcccctttgtactgcttaaaaaggggaaccgtgtgcgcaccatagcggatgagattttcgaggacgcccagatgagtccccgcatcgtgctggagacagaaaatatcgaaaccgtgctggctctcagcggcaagggtatgggaatcaccttttatcccaggatgttcatgtccccggaccctgcctcccattcctaccgcagcgcggtcctggagcagaaccacctgaacctgtattccttaaactacacccgggctcacggcgtcctgggaatcggctaccacaagggacgctacatgtcccgggccgcccacgaattcatccgcattgcaaaggaacggctggactatgccccctaaaaaaataatgctttatacctgatatatgtattagataccctgcttccctcataagatggatgcagggtatttttcggcccttgacagtgtatccatcttctgctaaaatataaacagtaactattattattatctttatatagagaaggagatgcgatgaaagctctaaagtatagccgtcagagggaatccatcaaagcctgtctgatgaatcgtcacgaccatcctacggcagacgccctatacgccagcatccgtgaagaatttcccaatatcagtctgggaacggtttaccgtaacctgaatctgctggctgagaccggcgagatacgaaagctgacctgcggggacggtgctgttcactttgatggagatacccgtcagcattaccattttgtgtgcagcgagtgtaatcaggtttacgacatggaattaggcgccatggaggacctgaataaggaagcccaggaacatgcgccgggcatcatcgacagccactacgtactgttctacgggcggtgcaacagctgtttacaaaaaaaagttgataaagctattgacaaaccagcctaaatgatttatattgatatcagtaataattactattattgattatcaacaactcgtcaggatgcccggacatccgttgtccggctcctggccatcattataaaaaggaaaaggagaatattgattatgaagaaatgggtatgtacagtttgcggttatgtttatgagggagagaatgcacctgagaaatgtccacagtgcggtgttccggcttccaagttcaaagagcaggcatccgagggaatggcatgggcatgcgagcatgaggttggcgtggctcagggttcccctgaagatatcatgatggatttaagagctaattttgaaggcgagtgctccgaggtcggcatgtacctggctatgtcaagggttgcccacagagaaggttatcctgagattggcatgtactgggccaaggctgctttcgaggaagctgagcatgctgccaagtttgctgagctgttaggcgaggttgttacctcctccaccaagaagaacctggagatgagagttgccgctgagaacggcgctaccgccggcaagttcgacctggctaagagagcaaaggctctgaacctggacgcaatccatgacaccgttcatgagatggctaaggatgaggcccgccacggcaaggcatttgagggtctgctgaagagatactttggctaagaaatcgccggtatccggcttatgacttttacagaatcaggagaagagtgcgctcttctccttttttgcgtatgaaatcctctgtccggaatgtgccctgcaattgctgttttgtactgtaccgggcaattgtcatagaatcttcataattaaagccttgaaccccttatccatctgtgctagactaagcacgaaaatgctaaaaaatacctgctgtgggaggtcctattattgatacagaatattcttagttttcttgaagaatccgcagaagcttatccccggaaaacggcttttgcagatgaacatacaagccttacctaccgcgggctgtcagacctgtctatgagaatcggcagcgttctggcacagaaaacaggcccgcgccgacctgtacccgtgctgacagaaaaaaatgtatttaccctgggcgcatttatgggtattgtccgggcaggctgtttttatgtctgcctggatgcaaaccagccggccgaacgtctgaaccggattctggacacccttaaggcggaccttatgattgccgataaggaaagccttgacctggccggcggtatctccttttcaggtgagatactgttcctggaggacttaaagtctctgccggatgacgccctgaacagcagtctccttgcgtccatccgcaggcaggccgctgatacggaccccctgtacggaatcttcacctccggctccaccggcgtgcccaagggtgtggtggtgagccatcgctccgtcattgacttcatccagcattttacggacctgttccatatcacacaggatgatgtcatcggcaatcaggcgccctttgactttgatgtatctgtaaaggacatctactccgcccttaaaaccggagccacgatggaaattattcccaaaaaactgttttccatccccaccagccttctggactacctgtgcgacaggaaaatcaccacggccatctgggccgtttccgccctgtgcatcattaccaccctgaaaggctttacctaccgcattccatcccatctgaataagattctcttcagcggagaggtcatgccggtaaagcatctgaatacctggcgcagttacctgccagatgccctgtttgtaaacctgtacggccccacggagattacctgcaactgcacatactatgtggtggaccgggaatttgaacccggaacccccattcccatcggagtaccctttcccaacgaaacagtattcctgctggatgaaaataacaggctggtcacagaacccggacaaaacggcgaactctgtgtggcaggaaccgctctggctctgggctactacagggatccaaaacgaactgccacggcctttgtccagaaccccttaaatccctgctatcctgagattatatacagaaccggcgacctggcctgctacggcagggacggacttctgtatttcaacgggcggaaggatttccagatcaaacacatgggacaccggatcgagcttggcgagattgaggctgcccttgaaaccgtggagggtgtggacagggcggtatgcctgttcctggaagaaaaaaataaaattgcggccttctatgagggagccgctgtcaaaagggacatcgccgttggcctggaacatctcctgccgcgctacatgttccccgctttatacagaaacctgacggaacttccacgtaccaaaaacggcaaagtggaccggcaggcactcaggaggctttatggataaccatatattgcaggaagctgtccggacatacaacacgccttgctatatctttgatttagacgtgtttatctcacgtatccgccgcatggaacagatccttggaaaacaggtgaatatctattacgccatgaaggccaaccccttcctgacagctgccgctgcccaggcagccggcggcctggaggtctgttccccgggagagtatgccatctgccgccgcgcccgtgtgccggcccagaaaatcgtcctttccggtgtcaataaggaggaatcccacatccgctcggtcatggcagagcagggcgccggaacctacacagctgaatccttaaatcagctcaggcttttagaggcttgtgccggcgccgcaggccgcaccggggtcagggtgcttctgcgcctgaccagcggcaaccagtttgggatggatgaggaggatatcctcgcctcaatccgtaatcgggactcctatccccatctggacctggcaggcctccagtactattccggaacccagaaaaagggaatggaaaagatagaaaaagagctggtaaagctggattcatttatggattttgtcagggaacatctggattttgagtttcgggagctggaatatggccccggcttccagataccttattttgaaggacaggaacaggctgacgaagaaattcttttgcaggaattcaaaaaagcccttgattccctgaattttaaaggtataatctttctcgaggcaggccgtttcctggccgctccctgcggcagctatctgacccgcgtggcggacgtgaaacgaagccagggacagaattactgcattgtggacggcggcattaaccacgtcaactattatggtcagaccatggccatgaaggtgcctgcttaccggtatataccccaggacaatccggcccgtcctccggcatcacaaacctccggcgaccgctggaccgtatgcggctccctctgcacatcgggggatatacttgtaaaaaatctgcccctggacggcctgatgacaggggatttgctggtatttgaccgtatcggcgcttactccgtaactgagggcatttacctttttctgagccggaagctccccgtggtcctcacctgcacacaggaacacggcctttccctggtgcgggacgccctgcccacagatatacttaacgacggctctgccatggagatatattaatcacagagcaattcttaaagatgctctgacacataaaaggagaacaataaaatggatgaattattagaactgttagaagacataaaacccaccgtggatttcaggacatgcacaggcctgattgatgacggatatctggattcctttgatatcctgtccattgtcagcgaactgaatgatgcctttggaatcgagatatcaccggtggacattattccggagaattttaactctgcccaggccctctggaacatggtagagcgtcttaaggacaattagaggagtatgttatgtcgtttctttcaatgaaattcctgctgtttctggcagcagcagtggccggatattatgtaataccaagacagctccagtgggtatggctgctcatcttcagctatatattttatctggcctccggcccggcggcggtagtgttcatcctgaccactaccgccactacctttctgggcgggctgtggctggagcacacggaccgcgccctggcctgcgccctggaccgaactccggcgcgcgatccggaccgtactccggactgcggcccggaccatacgctggactgcggcccggaccatatgctggactgcggcccggaccatacgctggactgcagcccggaccatacgctggactgcagcccggaccgcctccggcgcccggccaatcctcagcagcccctttccccggacgaaaaaaaggccttaaaggagcggttcaaacagcgcaagaaatggattgctgccctggtcctctttgtaaacttcggcattctggcagcattaaaataccgcaactttgccgcagataacatgaaccttctcttcggcacccatttttcctctgcaaagcttctgctgcccttaggaatctccttttacaccttccagtccatgggctacctcatcgacgtgtacagaggtaaatacgcgcctgaccgcaatccgtttcgttttgccctctttgtctccttcttcccccagattctgcaggggcccattggccggtacgaccgtctggcatcccagctctacggccagaagagcttcagccttacccgcatagagaggggacttcagctcatgctctggggttatttcaaaaaaatcgtcatagcggacagggctgcggtggttgtcagcgaagtattcggcaattaccagtcctatggcggcatcctggtgatggccggtgtactgtgctattcccttcagctctacggcgatttctcaggaggcatggatgtaatcatgggcgcctcagagtgcttcggcatatctctggacgccaattttaaacgcccctattttgctcagtccatatcagacttctggcaccgctggcatatcacactgggcacctggatgaaggactatgtgttctatcctttttcactttcaaagggcatgaacaaattcgggaaattctgtaaaaaacattttggaaagcatgtgagcagagtgctgcctgtatgtatcgccaatctgctggtattcttcctggtgggcgtgtggcacggacctgcctggaaattcattgtttacggactttataacggaatcatcattgccgccagcaacctgtttgcccccttttacggggaaatggcccgcaaactgcacataccagttgaatccaggccctggatggcggtccggattttaagaaccttccttcttgtaaatatcagctggtattttgatatggctgtaagcctgggagccgcattgaccatgatgaagaatacctttaccggattctccctggctgccctgtcggacggcagccttctcaggctgggcctggatcgcaaggactatgccgccctggccctctcctgcactgtcctgctggcagtcagccttctccaggaaaaccatgtcaacatacgggataccctgtccgcaaagccgctggccgccagatggtgcgtctatctgatgctgctcttttccataccgctgctgggccagattaccatgacgggaggaggttttatatatgcccaattctaaccaaggagccggccgttttcacaaatggcttccacagtggcggaaggccatcctgttcctgtccctgtgcatatgcatcacggcagctctcaactatggttttatacctccaagctccgtgagaatcaatcttcataaccttagaaacggagagacatacgacacgatcttcattggcacctcccacgggcagtatggcattgaccccttttccgtggatgctgcctccggcggcagctccgtcagtctgtgtatggcggacgcctatccggacgatatgtaccatatgctgcggcttgcctgtgaaacccagtcgccgtcccgcgttgtatacgagctggacccctcatactggatgaatgaacagcgaagcggatccaccctgattttcttctatcaggagttcccggcttccaggtccaagtttttttatttcctggataaaatcataaacctggatttccgctctgcactggctccgtggagctactaccgcaacctaataggccaggtcccggaccacatacgccgcaaacaaagcactgcctataaaaactatgacccatctgtcctggaaatcccgggaggccattacgcgggccggggctttatctatcgggaccgggtagcaggcgaggataaaggcaccttcaacaacatcccctgggatgagagccaggtaaaatccaaggcagagctatattttaaccgcatagctgcgttctgccggaaaaacggcattgaactgactgtcatcaccacgcctgtcccccaggaaacccttgataaatttgccggttcctatgaccagtcccacctgtattttaagaagctcttagaaggcctgggtctggaatattataacttcaattatatgaagccggagcttatggaccgcagtatggaagggtactgggactacgacggccacatggacggcgtcaaggcccaggaattcagcaccctgctaggcagcttcctgaacagcctggaccagggcagtttaacacacagtgactattttattaattgaatacgcatcataacataaggaaattataaagaaatatccccaaagtcctccacggtgccggccgggcgcgagtctgtgaaagtttttctgtaattaaagatttataaggtcttctatgataaaataaaaatcataggaggcctttttattatggcaagagaaaagaaatctgtacacaaagtgcaaatgacggatggaaagcgaaatatcatccagcagcttcttgaggagtatgagattgaatctgcccaggacattcaggatgccctcaaagatctactgggcggtaccatcaaagagatgatggaatccgagatggacgagcatcttggctatcgcaagtcagaacgttccgattgcgatgactatcgcaatggctataaaaccaaacaggtgaatagcagctatggaagcatgaaagtcgaagtcccacaggaccgtaactccacctttgaaccacaggtggtaaagaaacgccagaaagatatctctgatatcgatcagaagatcatatccatgtacgctaaagggatgacaacacggcagatctcggaaacactggaggatatctacggcttcgaggcctccgaaggcttcatttcggatgtgacggataagcttctgccccagattgaagactggcagaaccgccccctttccgatgtctatccggtgctttatatcgatgcaatccactattctgtacgggataacggcgtgatccgtaagctggcggcctatgttgtactggggattaattcagatggtttaaaagaggttctgaccatcgaggttggcgaaaatgagagtgccaagtactggctttccgttctgaacggtttaaaaaaccgtggagtaaaagacatcctgctcctctgtgccgatggactgacagggataaaggaagcgatagccgctgcctttccaaagacggaataccagaggtgcattgtccatcaggtgcggaatacgttaaaatacgtatcagacaaggaccgtaagctctttgcggcagatctcaaaacgatttaccaggcgccaacagaagagaaggcattagaagccttggagcggggcacaaaaaaatggtcagaaaagtacccgaattccatgaaaagctggcaccagaactgggacgcgatcgtccccatctttaagttttcaacgactgtacgcaaagttatatataccacgaacgcaatcgaaagcctgaacgccacataccggaagctgaatcgtcagaggagcgtgtttccaagcgatacagcccttttaaaagcgctgtacttgtcaacatttgaagcaacaaagaagtggacgatgccaatccggaactggggccaggtatatggggaactgagcctcatgtatgagggccgactgccgatgtaagagaatccaggaccgttcaaaccaggcgggaatccgcctggtcttgacatatgcagtattgtgcggtatatataaaccaagggctgaacgctcatagagaagctttcagccctgccattatcatagaagagctgcttttacagagatttcttcacacactcccgggcgccatatgttccctctgcggctttcgggatatttcttttttaattttcttttttgaacttcttcctttttaatctctttctccggtttatctttctctttattccttgcctattttctttatttgtttttcttatttggtttttcttatcctttttcttatctatttctcttatctatttctctctatctatttctcttatttgttttccttattcgctcttcttctccaatcttcttccctaatcttcttccccacccttctattctattcttctattctattcttctattctattcttcttttctattcttctttgctattctattatacaattcttccctgctggcctttatattaacccatccccctgctttcccactctcattttttatgctcacattttttattttaggtaaaaaaaattcaaatatctattgacaaatctctcaaagtggtttatattaatatcagtaacaattactattattattttaataaataaatgaatcccgaggattcacacgaaatgcataaaggaaaaggagaatattgattatgaagaaatgggtatgtacagtttgcggttatgtttacgagggagagaatgcacctgagaaatgtccacagtgcggtgttccggcttccaagttcaaggagcaggcttctgaaggaatgacatgggcatgcgagcatgaggttggggtggctcagggttcccctgaagatatcatgatggatttaagagctaattttgaaggcgagtgctccgaggtcggtatgtacctggctatgtcaagggttgcccacagagaaggttatcctgagattggcatgtactgggctgaagctgccttcgaggaagcagagcatgcagccaagtttgctgagctgttaggtgaggttgttacctcctccaccaagaagaacctggagatgagagttgccgctgagaacggcgctaccgccggcaagttcgacctggctaagagagcaaaggccctgaacctggacgcaatccatgataccgttcatgagatggctaaggatgaggcccgccacggcaaggcatttgagggtttgttaaacagatacttcggttaaatcctgttttaagcatcacatcccagcctctggtttcatccggctcatttaagccggaaataccaaaaaggtgaaactttttacaaaataacacttgacaaatcctggaatatggtttatattaatatcagtaacaattactattatcgaaaaatgaataactaaaatgaaggaaaaaggagaatattgattatgaagaaatgggtatgtacagtttgcggctatgtttacgagggagagaatgcacctgagaaatgtccacagtgcggtgtgccggcttccaagtttaaagagcaggcatccgagggaatggcatgggcatgcgagcatgaggttggcgtggctcagggttcccctgaagatatcatgatggatttaagagctaattttgaaggcgagtgctccgaggtcggcatgtacctggctatgtcaagggttgcccacagagaaggttatcctgagattggcatgtactgggccaaggctgcttttgaggaagctgagcatgctgccaagtttgctgagctgttaggcgaggttgttacctcctccaccaagaagaacctggagatgagagttgccgctgagaacggtgctaccgccggcaagttcgacctggctaagagagcaaaggcccttaacctggacgcaatccatgacaccgttcatgagatggctaaggatgaggcccgccacggcaaggcatttgaaggacttttaaacagatatttcggctaatttttgacatagaatcaattttaccctccaaaccaggaatacaggtagtctccccagggctgcctgtattcttatctgccatatgtttttcataatccccagccaaacgcatcagtcttaaactaatttattacatatttccccgacaatgaatggcagtaaaatattgatttttagattgaatttctgtaaataacaggatacaatagtttataggtagtaaaaaacgaaacaaaagagaaaggtgaggtacaatttatggcatcaaaatacgcaggaaccaaaactgaacagaacttaaaggacgcattttcaggcgagtcccaggcacgcaacaaatacacctattatgcatccgctgcaaaaaaagcaggttatgagcagatgtccgctttatacctggagaccgcagaccaggaaaaagagcatgccaagatgtggttcaaggaactgcacggcatcggcactcctgaggagaatctggctgacgcagcagcaggtgagaattacgagtggactgatatgtatgcacgcatggcccgtgaagcacgggaagaaggcttcgaggaactggctgttaagtttgaactggttgccaaggttgaggctgcacatgagagaaggtataacaagctgttagaaagcttaaagaacgacaagaccttcaagggcgatgcgcctcttggctggaagtgcagaaactgcggatacatccacgaaggaccggaagctcctgaggtatgtccttgctgtgctcatcctaaggcttattttgagaggaaagttgagaactattaagaggtagaagggatggtacgcgggcgcctgtagggagctcggtccgtgagaaacaggggagcagcagtgactcccctgtttctcacccactacatattcaaaagcgcccgctgtctcttcccacgctaaggagaaaagacagacggacgctttttactgttatattgaaatttcaatttagattcacgaacaagtgctattaggaacaccagccttgaggcactttaagcagtttccctttttatctggggcgcggaagggccagcgggtgtgtttcagaacagccgcgtaccatcctaccggttctcaatctccataatcatattcaccctgcgctcatgccggccgccctcaaactcagcgtccagccatgcctctgtaatcatcttggcaagctcgctgcccactaccctggcgccaaatgcaagtacgttggagttgttgtgcactctggacagctttgcggtataaggctcgctgcacacacaggcccggattccctttaccttattggctgccagggagatgcccacgccggtgccgcagatggcgattcccaggtcagcctgaccgtcagccacggcccgtcctaccttttcgccgtatatggggtagtcgcagctctcggtggaattggttcccaggtcaatgacctcgtagcccttttcttccacaaactccttgattatgttcttaagctcaatggctgtatggtcgttaccaattgcaattttcataatttctcttctccttttatctatttctgtgttatgttataccctttcccgggcaaagaaggcctgcacccggtccagccgggatgtcatggacagaagcagcatgtcggccgccgtcaatgcggccatggcttccaccaccactacggcccttggcacgatgatggggtcatggcggccttttatctccaccatggtctcctcaccgttttggttcacggtgtgctggggctgggcaatagagggggtgggcttaaatgctgcccgcatcacgatatcgcttccgtcgctgattcctcccagtgtgcctcctgagtgattggtctgcttctcaatcctgccgctcaaatgcgggctgccgtccgctgccttatgtgatatgccgaatccgtcgttattctcagatccccgtgccctggatgcggcaaagccgtctcctatctcaaatcccttgaccgcgccaatggacagcatagccttggccaggttggcatccagcttctcaaatacaggctctcctgctccggcaggcataccgtagatgatacattccaccactcctccgcaggagtccttcccggccatcagttcctccagccgggcctctgcctgtgctgctgcccgggcatccggcatgtacagcctgttattccacatctcgtccaggtcaaagcgctcctgtgcaatgcaaatgccgcccacctctcttgtatacgccctgaccgtaattccaaggctttccagaagtctgcaggcaatggcgcccgccgccacacgggcaatggtctctctgcctgaggaccgtccgccgcccctgtagtccctgaatccgtacttctggtcaaaggtgtaatccgcatggcccgggcggtaaatatccataatattgctgtagtcatgggaacgctggtctgtattgcgcacctccagagcaatgggagtaccggtggtccttcccccgaacacgccggacaggatttccacctggtccccttcctgtctggccgtggtaaacttgctctggcccggctttcgccggttcagataggactggatgtccccttcttccagaggcagtccggccgggcagccgtccaccaccacgccgattccctttccatgggattctccccaggtcgtcactctcaatattgttcccaatgcagaacctgccatatactgtctcctgtcctcctgtatctataacccactatctcgttaatccggctgtctcactaattctactatctcgttaatccaactgtctcactaattcttactatctcatcaatccaactatcttctcagactaatttccaatcttcgcaatagcgcagcagtttggctcgttcaccatgacgcttcgtccgcacataacgatgaggcccttctcataatccacttcaaagaagctgatgctgccgctgtcatggtttatggacgcgatatgtttctgatccgggaatatagccacatcctttggatattcaccgctgacaggcagacagcagatcatggtgagtagaccggatttctcatccctgctgtagatgctcactgtattttcacctgcattggtgcagtaaacatatttctcatccggagacagcctcatggcgcaggcagctgtcagattgcccggattcttggtggaggtggtggaaatagtctgtatcttctcaaccacaggcgccctgtcaccggtttcataagaataaacgcagattacattctgcagctcatgcatcagataaaggaaacgtccgtcggagctgtagcggaaatgtcttggagccgactccaggtcgcagtggatggcatctacctgaaacagcctcttatccttgtcgttgaaacggtatacctttacctggtccgttccgttgtccaccgacagaacatacctgccgtcgggcatccttctggtacaggtaacatgtgagcggaagttgcgctcagccacgctgccgtatcccttgttgaacacctcgtccacaatctgccccacagaaccgtccttgttaaggcttaagaccgtggtcttgccgtcatggtagcctgacacaaacacgtatttatcttccatatcagtacacaggtggcagcccctcatgccgcggatgggagcgctgttcagtcttgcaaggcttccgttctgcaggatccggaaggatacaactccctcatccgcgatggagtacaaggttttcccatcgctggaagcaatgacataggaggagttgtccacttccatctcacacctctccctaaatgttccgtttttcacatccacgtcaaacactgtgattccctttgcttttccggtgtaggaataggatcctacatatgccatatatttgccgctcatacctgtctgtacctccctgatttacgtcggttttcatttcaatttagactaaaaacatcatatcataaatttgtgaatttgttaactggaagtttgtgaaattctcccccactgttcatccctaaacttgtccctaaacttatctgccaaatctttcaaaaaggtattgacataccactgatttaatgtataatgaaattcgcgcttgtttattattactaaactttttgcttatttttatagtcagttagtatttgtaaactttttgttcagaaacgcgagacagggaggagctccatggaaatcggaagtaaactaaaggaactgcgggtgttaaagggtctgacccaggaagaactggctgaccgggccgagctttccaagggattcatttcccagctggaacgtgacctgacgtctccatccatagctaccctgatggacattcttcagtgcctgggcaccaccatcggtgaattcttcaatgaaacgccggatgaacaggtagtatttggtaaacaggattattttgagaaaattgatacagacttaaataatgaaatcaaatggattatccccaatgcccagaaaaatgtgatggagcccatcctcctcaccttaaaggccggaggctccacctatcctgataatccccatgaaggtgaggaattcggatacgtgctccagggaagcatatccatccacataggcagcaagacatacaaggcaaagaaaggggagtccttctacttcacgccggataagaaacattacctgacaagcaggaacggggcccttcttctgtgggtgagctcgccgccaagtttttaatcacattaagataaaaggagattttgattatcatgagccagcctttcattgatttacagcacatatcaaaaagttttgacggcgagctggtcctggacgacctgaacctttccatcagggagaacagcttcgtcaccttgcttggccccagcggctgcggcaagaccactaccctgcgtatattaggcggctttactacccctgacacaggaaaggtaatcgtcggcggacaggacatctccatgattccacctaacaaacgcccgctgaataccgtattccagaagtatgcgctgtttccccacatgaacatcgcggaaaatattgccttcggcttaaagattaagaacaagccaaagtcctacattgatgacaaaatcaaatatgccctgaaattagtgaacctgcccggatatgagaaacggaccgtggactctttatccggcggccagcagcagcgtatcgccattgcccgggccattgtgaacgaacccagggtgctgcttcttgacgagcccctcggggcgctggatttaaagctgcgccaggatatgcagtacgagctgatacgccttaagaatgagctgggaattacctttatctatgtgacccacgaccaggaggaggcccttaccatgtccgacaccatcgtggtcatgaaccagggatacatccagcagatgggatcccctgagcagatttataatgagcctgaaaatgcgtttgtggccgacttcatcggtgagagcaatattgtacccggcaccatgatccgggacgaactggtagaaatcttcggcgcccgctttgcatgtgttgacaagggtttcggcaataataagcctgtggatgtggttatccggcccgaggacattgaccttgtaaagcctgaggacggaaccctccagggtgttgtgacccacctgattttcaagggcgtccactatgagatggaggtaaccaccccggacggtttcgagtggctggtgcattccaccgatatgtttcctgtaggccggcaggtgggcatccatgtggagccctttgagatccagatcatgaacaagcctgcttctgaagacgaggaggcgctgggagtcaatgaatagcgaaaaaaaaggcgccgccatcggcaaggcgctgttatcaggtccctatcttatttggatggccggctttacactgattccgctggccatgattatatggtacgggctgactgacaagggcggcggcctgaccatggcaaatgtcattgccattgcttctgcggaccacgcaaaggctctgtggctttcccttggactgtccttagtgagcacggttctctgtcttttgttagcgtatcccctggccatgatactaaggggccgaggagccgcggcaggaggattcattgtattcatattcatccttcccatgtggatgaacttccttctgagaaccctggcctggcagacactgctggagaaaaacggagtcattaacggtatccttaactggcttcacctcccgtcccagtccatgattaacaccccgtcagccattgtgctgggcatggtatataacttcctgccctttatggtgcttcccatttacaatgtgctatccaaaatagacgataatattataaatgccgccatggacctgggagccaacagcttccagcgtttcaccaggatatggtttcccttaagcataccgggcatcatcagcggcatcaccatggtgtttgtcccttccctgaccaccttcgttatttccgatttgctgggcggcagcaagattctgctcatcggcaacgtcattgaacaggaatttaccaggggaagcaactggcatctgggaagtggactttcactggtcctcatggtctttatcctaatcagcatggccatgatagccaaatacgataaaaacggagaggggactgcattctgatgacaaagagttcaaaagtactgcggaagatcatatcggatttttatatggtgctcatactgatcttcctttatgcccccatccttaccatgatggtcctgtccttcaacaaatccaaatccaggacccagtggggcggatttaccctgcagtggtacacccagatgtttgacagccgctctatcatgagcgccctgaccaccacgttaatcatagcctttgtatcggccctggtggcaacagtcataggcacggcagcggccatctccatcagttccatgcggaccgtgcccagaaccattgtcatgggcgtaaccaacatccccatgctgaacgctgacatcgtaaccggtatatccctgatgctggccttcattgcctttggtatttccctgggatttaagaccgtgcttatatcacatattacatttaatataccctatgtcatactaagcgtcatgcccaagcttaagcagacggataaatacacctacgaggccgccctggacctgggtgcatcccctctgtacgcatttttcaaggtggtgttcccggatatcatgcccggtgtgctctccggcttcctgctggcgtttaccatgtccttagatgactttatcatcacccacttcacaaagggcgcgggcattaacaccctgtccaccctgatttacagcgaggtaaggcgcggcatacggccgtccatgtacgcactgtcatccattatatttttgaccgtgctgattcttctcatctttgttaacttccggtccattaagaagccggaaaaggcataaccgaattcagacattaaaggagaacgattatgaaaaagaaaatggcaatcacccttgctgccgcatccatggcagtgctgtccgccgcccttttaaccggctgcggcaagtccggttcctcacccgaaggaggaaacaaggaagacaacaagttaaacgtatacaactggggcgagtacattgatgaggacgtcatcacccagtttgaggaggaaaccggcatacaggttgtctacgatgtatttgagaccaacgaggagatgtatcctgtcattgaggccggcgctgtaaaatacgatgtagtatgtccctccgactacatgattcagcgcatgattgagaacggccttctggctgagctgaactttgacaacatccctaactataaggagatcggccagcagtatctggatatctccaagggatttgaccctgagaacaagtattccgtaccctactgctggggaaccatgggaattctctacaacaccaagcgtctggaggagctgggtgttcccgctcccaccaagtggtctgatttgtgggatgagcgcttaagcggcgagattcttatgcagaacagtgtaagagacgcgtttaccgtggccctgaagatgaagggatactccttaaacagcaccaatcccgatgagctggccgaggcacgcgacctgttgatcgagcagaagcctcttgtccaggcatatgtcattgaccaggtaagggataagatgattggcggcgaggctgctgtgggcgtgatttattccggcgaaatgctctacatccaggatgctgtggcggaacagggtctggattacagcctggagtatgtaattcccgaggagggaaccaactactggatcgactcctgggtcattcccgccaacgcggagcacaaggaaaacgcggagaaatggattgacttcctgtgccgccctgatattgccaaaaagaactttgaatatattacctacgcaacgccaaacacaggcgcctatgatttgctggacgacgaccttaagaacaacaaggccctgttccctgatttggataagctgccaaagtgcgagattatccagtatctgggggatgatgtggacaccatctacaatgacatgtggaaggaaattaaatccgagtaaaaaccagtcacaggattaaataataaaaaggaagttccgggcgggagacttaagccgatacctgcctcgcggaacttccttttatacatttaatcctattgaccgtttcatcccggcgtcacccctcgcgtttcccgtgctcatggtatccatggcacatggaggaacccgcgcagccaccgcatccgccggcacatccgccgcatcccttacctgcctttttatcccttatcataatacggaccactgcccctataatcacagccaatatgaccagaataattaatgttgaaagattcatatatatcctcctttccttcctgtttattcccggactctccgtttgccacaggttctccgtttgctccaggctccacatctgccacgggctctttaacggcccttcgcctttttcttctgccgtatttttgcaggttagctatttctaactccattcacagattagcactttctaactctcttgtcaatcgtttttttatatgttacacttagaactatcatactaaataaacgggggtatttacaaacttgaaaatacaggaatcagcagaaaattatctggaaaccatactcatgctggccaaggaacagccctatgtccgctccatcgacattgccactgagctgggcttctccaaacccagtgtcagcgtggctatgaagaatctccgccagaacggatatgtccagatggacgaccagggacatatcacgttgacgccatccggacaggccatagcggacaccatgtatgaacgccatacactgctgtccaactggctgatttacctgggtgtggaccccaggacagctgctgaggatgcctgccgcatggaacacaccctgagcgctgagagcttcgatgccatcaagcgccacatcacccacggccacgaactgccggattaggaggaagcctatgcttaaagaccttgtgaaacaatgccgctcttacagaagattttatcaggatactgttatcccatacagtgaactggctgatatggtggatacggcccgtctggccgcttctgcttccaatgcccaggccctgaaattcaaaattttgtgcacgcccgaggaatgtgccggtatcttcccgtatactgcatgggcgggcgccctgaaggattgggagggaccagaggagggcgagagaccctcagcctatatcgtcattgcctgtgacctgtctatcggaaaaaacaaacagtgggacgatggaatcacggcccagaccatcatgctggctgccgcggaaaagggatatggtggctgtatgattggcagctgcatgcggtcagagattggacggctcctgggtcttgatccggagcattacagcatagacctggtgctggcccttggaaagcccaaggaggaagtggtactggtgccggtaaaggaagacggctccaccgcatactaccgtgacgggaatcaggttcactatgtgccaaaacggagcctggaggacatccttctgtaatggtttgaccatgtttggctgtcatcacttatacaatattttccgccatgaatcaaacaaagcgcatcgggttgtcatgtattctcatgtacccgatacgcttttttcatgcttctgaaagggaaatctttcttcgctgttaaagggctgcgcgcttattacagggacagggctctcattgcgttgagaatggcaataaccgacacgcccacgtccgcaaacactgcctcccacatgttggccatgcccgcagcacccattaagagcaccactgccttgactcccagcgcaaatgcgatgttctgctttacaatggacatggtctttcgtgatatgcggaccacatccgcgattctggcaggattatcgtccataagcacaatatccgctgcctcgatggccgcatctgaacccatgcttcccatggcaattcccacgtccgccctggagagaacaggcgcgtcattgattccgtctcccacaaaggccagcctgtgttttccggtctgctgggccagcagctcctccacctttgccaccttatcccccggaaggagctccgcatgaacctcatccagacccagcctggccgccactgcttctcctacctctttcttgtcgccggtgagcatgactgtccttctgacgcctacctttttaagattcttaattgcctcaaaggcctcatccttgatggaatccgctatgacaatgtatccgcagtatacgccgtccagtgccacatagacaaccgtacccatgctcatacactcctgatacgccacattcatttctttcatcagcttgctgttgccggccagtacggtatgaccgtctatctccgcctggactccatgaccggatatttcctgtgcattgctgacacggttcatatcaatggtatctccccaggcatccttgatggaacgcgaaatgggatggtccgaataactctccgccaaagccgccagctccagcagggagcgctttccctcatcagaaggctggctggccgcccacaccctggtccgcggtacctcagacgcctccgggacaggactgccggttaccgcgtgaatctcagtcaccttgaattctcccttggtcagcgtacctgtcttatcaaagacaatggtatccatctcagacagagcctccagatagttgcttcccttgatgagcacacccttcttggaagcagcgccaatgcctgagaaaaagctcatgggcacggaaatcaccagggcacacgggcaggagattaccaggaaggtacaggcccttcttacaccctcggaccaggactggccaaaaaacaggggaggaatcacagccaggagcacggcccccattaccaccagaggggtataatatctggcaaaccgtgtaatgaagttctccacatgggcttttttgctgctggcgttctccaccagttccagaatctttgccactgtggaatcgtcaaattcttttgtgacctgaacccgcagaaggccgctgccgttgacacagccgcttatgatatcgtccccctctgccaccttgcgcggcacggattcaccggtcagtgctgaggtatccaccatggagttcccaaacacgactttgccgtcaagaggtattctctccccggccttgaccacgatgatatctcccacctgcacatcgtccggatccacctgctttaactgtccatcctcctctatgttggcatattccggacagatatccataagctccgtgatggactgcctggaacggttcactgcgtagctctggaacagttctcccacctgataaaacagcatgaccgcaaccgcttccgaatattcccccacgccaaaggcgccgaaggtagccactgtcatcaggaaattctcatcaaacacctggccgttgcggatattgcggaatgccttatatacaatgtcccatcctataagaacatagggaaccagatacagggccatctttccccacaacccaagccactccggtaaaatctccatatggtctgtcactgccagggtaatataaatgatgaatgctgctatgatacgggacagcattgccttttgtttcttagtcatatcagtttcctttccggtgccgtactgcttcgcttaaagcaggataacgcagtcaggctccaccttcctgcacacagacaccacttccttcatgatttcatcgaacctgctgtcatctgcttctatggtcatcttctgggtcataaagctcaccgtggcatctgatacaccctcgatcttcttgattgcttcctccatcttggctgcacagttggcacaatccaggtcctgtaatttgaattttttcttcataattattctcctccatatttgttattttatttatattccatgttccatccccgcgccatgggcatctgcctcaaagtctattcctctatgtgctccatgccctggttgatgatggtcctcacatgactgtccgccagcgaataaaatactgcctttccgtccctgcggctctttaccaggcggttctgcttaagaattctcagctggtgggaaatagctgactggttcatattaagcagctgcgcaatgtcgcagacacacatctcagcctcaaagagcacatataatattttgatcctggtggaatccccaaacaccttgaatatctctgccaaatcatatagcttatcctcatccggcatcttatcattgaccgcctttaccacattctcatggacctggtaaaaatcgcagcactccacatcgtttatcgccatggctcataacctccctttcttatttttctcattcatatgaatgattgttcatatgtttatatttacattatatactcagatttaaaaatgtcaactgcttttttctctattttgttttgtttgaaaatttaattattgtttgaaaattgcattctgaccgtcaaagcaaaaaaacagagccggcccataggaccagctccatgtgataatcttatatataatactactcttcctcagcggcaaccgcgatatgcagctcctccagctgtttctcatccacctgtccgggcgcctctgtcatcagacaggaagcatccttcaccttggggaacgcgatcacatcgcggatactgtcagctcccaccatcagcatcaccacgcggtccaggccatatgccaggcctgcgtgaggcggaacaccatacttaaatgcttccagaaggaagccgaactgctctccggccctctcaggcgtaaagcccagcacctcaaacatcttggactggatatcagcctggtggatacggaccgatccgccgcccatctccacgccgttcagcacaatatcatatgccttagcacgaacccggccgggatcagaatcaatatactgtaaatcctcatccatgggcatggtgaatggatggtgcatggccacgtagcggtcctcctcctctgaatattccagaagcgggaactctgtcacccacaggaacttaaagtcatccttcttaagcaaatccagctgtctggcgagttccagacgcagatttcccaggacatcaaataccaccttattccggtcagcggcaaacagcagcaggtcgcccggctttccgcccatggcgcttatcagggcagtcatttcctcctccttcataaactttgcaaaggaggacttgacggtgccgtcctcgctgattgccacataggcaagacccctggcgccaaagcccttggcatattccaccagagcgtctatctttttgcggggcatatgtccctgcccctgggcattgatgccgcgcacactgccgccattttccagagcgcccttaaacactgcgaactcgcagcccttaaccacctctgaaacattcttaagctccataccaaaacgcaggtccggcttatcagatccaaagcggtccatggcctcctgccaggtcatgcgaggaatgggcagctgcacatcaaaaccgcagatttccttaaacagcttctttaacaggcgctcatttacatccagcacatcgtccacatccacaaaggacagctccatgtcaatctgtgtgaattcaggctgtcggtctgccctcaggtcctcatcacggtagcagcgggccagctggaagtaacggtcataaccggaacacatgaggagctgcttgaacagctgcggggactggggaagggcatagaaggaaccgggatgcacgcggctgggcaccagatagtccctggccccctcaggcgtactcttaatcagggtaggtgtctcaatttcaaggaatccctctgatgccagaaatgccctggtaagggtagccacctggcttctaatcataagatttttctggatatccggtcttctcaaatccaggaaacggtacttcaggcgcagctcttcctttgtcttgctgttctcctcaatggggaaaggaggtgtctcggactcggaaagaatgcgcatggagttagccctgatctcaatggctcctgtggccaggttggtatttaccgcgccggagcgggcctccacccgtcctgtaacggcaactacaaactcgctcctcagcttttccgcctttgcgaagttctctgcgccgcagtcattttcctcaaatataatctgaaggatgccggagcggtccctcaaatccacaaagatgatgccgcccttgttcctgctcttctgaacccatcccatgacggtcacttcctgaccgatatgggcagtggtcacttccgtacatctatgggtacgctttaacccaaccattgattctgccattgtcttatctcctttattttccttaattcttcaggctttccttataaaattccttaaactccgtatatccttccctgcccagctgttccttctggaacttcttgttcttattcatctgggcaaccagaacctgcacgcccttctttctctcttccatggcttcgcggattacggctgccagcctggcgctgtccacacccttctcaaagagaaacgccttcctgtcagaagcgccgggcacagtgaatccattgtccataagaatggttacaatgcgttcaaagcctatggagaatccgcaggccggtgtctccatgcctgtaaacttgccgatcatcttatcataccggccgccgcctgccacggagccgccaaagccttccatggagacctcgaaaatagttcctgtataatatgacatgcctctgaccaaagtggggtcgaactccaggccgaaatcagcctcagccacctccgtcactgtgtccatgatgtgggccagtccttcgcttacatcggcaggcatcacctctgagagcatctgtcccagggcccttacaccggccgaatcctttgtcacgttcttaagcatgtccagatatttgcttacgctctccgggctgtggccggattccagaagctccttctccacaccctcatatcctatcttatccatcttgtccagggtgatgaacacctggtccatggactcctccgcaaaaccgcagtacagggccatgccacgcaggatgcctctgtcgttgatacggaccgtaaaaccgttgtccgggcagattcttccaagggcagtggtggtagccagaatcagctcaatttcagccaggctggtggcatctcccaggatatctatgtcacactgtacaaactggcggaaacggcccttctggggacggtccgcacgccacacgctgcccatctggagggccttgaaggggcttggcagattagctgcgttgtttgcgtaatagcgggaaagggggagggtgaggtcatagcgcaggccgctgtccaccaggtcattctcttcctttgagccttccaggttcagcttgtcccctcttttcagtatcttgaaaatcagtttctcattatctccgccctgtttgctggtcaggtttccgatatgctctacgcagggtgtctctatctgggtaaatccaaagcctttataggtctctttgatttgattcatcacgtactcacgaatctgcatctcagcaggcgtgatatccctcatgccggtgaccggcttctttgctaatgccatacgcgttctccaatcctgttttttgttcaatatctttattttaagcaacttttatgattttgcaagcattttcatagatttttccctatttggaccctattttatggcctctgccgcaatccgcatgcgctcataaggcactcccatgggaatggtgcagtccgtgcccaggataaagcctgtctcaccggcttctgccatgacgcgccttacctcctggcgaatctcatccggggtcccttctatcagtggtcctttgtggttagagaggccgcccataatggcgcagtccgcaaaccgtttcctgccctccgccaggctcattcccgtctcatagatgccccaattggcaatgctgtaaagtcctttataactgtcgtaccggtcaaaattcacatctgtcttgcacatgtgcaggatgttatgtcctcccgcttccaggcaggccttcataatctgcttatcaaacggcatgatatactcctcaaactcctggtccgtaaacaggaaccgctcgcctcccagtcccgcgtagaggatgccgtccagacccagttccacaaatttccccgccagctggcacagtccgtccgcaatccgcttcatggcgtcaagcaccgggcccttgttctgccttaaatggctgcagagcagctgccgcaccggcatatagccgtaatccggttcaatggggtggatggtggaggccacgatgccgtgaagggtaccgatattaaaggcgtccctgtcgcaccggtccaggaccctcttgaccagctcaatctcatcctccataaatttatccttaagtgtaatgggcctgatgcatttccagtcctccggcgtctttatagatcccatgttgggaaccagatgttcattcatgattttctggatatccggatttacctcccggaaaaacttcaggtgttcttccaccgctgcctgcccaaaggctgcctccctggcaaaatgagtggtaaagtaacagggaatcctgtccaccggttcatgcttcattgccgcaaatacacgctctcttttcttcacgatatctctccttatcagatggttattaactcaatcgttataataaaatctgccggaaccatgtctctttttacatgactccggcatttacgcttccgcgccgtatatgtccatataaaccgcgggccccggcctgggttaaaggatgcgctccttgcgctgtatcatctcgtcaatcctgctaatatactgttccacttcctttacattctcacaccgttccctgcggttttcagaaggaaagaccaccttggtggtggttcccgcgccgcaggccgctatggtctgcatctcctccataataaggatgttgtagatacaggctttgccgggcagggaataccctacattctcaaaattgccggccatgttcttctggcggtacagataatagggctccatacccatctggcgggcacaggcagcgctgagctcaatcatctccggagtgttctgaatcttcagcccgccgtactcttccctgaacatgttgagcctggccgccctcttgatggccagggaatggactgtaagggaatccggcgccagagcctttacctcctccagggtgcgccgcacatcgtccatattctcctcaggaagccccataatcagatccatgttgatgttgtcaaatcccagctcccgggccatgtaaaaccgatccttcaccatatccacggtgtggtggcggccaatcaggtccagggtcttctggttcatggtctggggattaatggaaatacgggtgatgccgtggtccctcagtaccttaagcttgtccatggtaatgctgtccggcctcccggcctccactgtgaactccagcacccggctcagatcaaagagctgctcaagcctgcttaagagagcttctaaatcctccgctgaaagggatgtgggagtgcctccgccgaaatagaccgtgtccaggggccttccctccatcttccgggccgtatattccagttccttaaacagcgcttccaggtaaagacctgtgcgccccttccatttcccgatgggataggaggtgaaggaacaatacagacaggtggtggggcagaatggtatccccacatacaggctgtaaccccgctcataatccaatggttccagaagctttttctccctagccgcaatctcaatgctcaaatctatcttttcatcgctggcaagataggtttccttcataaaggaccggatatcctcctccttccagccctcctccagcctggtgagggcgatcttggtggggcggatgccggtcagggaaccccagggcatttcctttcccgtgcgcgccgccagcatgaggtaaaacattttctttatgacattcttggtggcggagtgatccgaaaggtccgagggacgggtgcaggaatcccctaacatccagccctttaaaccctccgggcatgatggcgcctgcccctttcccggctccggcccggccgctcccccgctacagtcctccggccctgtcttatctccgccgcagtcctccgtggcggctgcattttcccatatatagatggaaaccgcgccgtctcccagccgcgtctccacgtaaaagtccgccccgtcctttacctcatgaacataagcctcacctggataaaaggacatcagaagttctctgatgtcctgttcgtactggttatcctgtattaaaagtccaatcatacaaaacctgctttctattataaaccttcttttattcctgcttgaaggcatccggtccttttacccggaggatattgtctcttactgtaagcacaggattcccctgcttctcaaatccaatggtggtggggtctccgtggcctgtatacaccatggtatcatcgggcagcgcaaaaagtacgtccacaatggagctgacaatacgaatggtattccctgtagccaggtccgtcctgccgtaggaaccgcggaacagggtatcccctgcaaagataattccttcatccggcagatagaagcagcaggagcctgcggtatgtcccggtgtgaacagcaccttccacctggttcccaggagctccagctcctgtccgtcgtgaagaagcacatccgcatgcaggctggtctggggtcctctgaatcctccggtcatattaagctttgtatctgccagcatattctcctctgcctcataggcatagagttttaccctgaatgccctgattacatccggcacagccatgatatgatcaaaatggccgtgggtcagcaggactgccgtgagagtgattcccagctcgctgcacttgttcagaatataaggagcgttgtcagccgggtcaatgaccacaccctccttggtctgatcatcataaaccaggtaacagttggtactcacctgtcccagtacacatgtcttaatcctaatatcgctcatatccttcccctttcatcacagctatcctgttgttctctctatatccaggacgccttctatctgacgtatcttatcggtcagccggttcagctcatcggtcccatgaatgtcaaatgtcatgataatggtggccttgccctgcttgctggtccttacgttcatggacgtaatatcaatctgcttctccgtaaagaccttggatatatcggcaaacatgccaatcctgttattggcaaatatcttgatttccgtggaatactgctcattgttgctggcgccctccgccatctgccattccgcgtcaatcatcctgctccgttcatcctccggcaggttgatgatgttcacacagtccgtgcggtgaatggaaaccccgcggcccctggtgacaaatcccacgatttcatcccctggcaccgggttgcagcacttggaaaaacggaccgccagatcatggatccccttgaccatgatgccgctctttgatttgcggacgctggcctcaccggcccttcccgctgtgtcggctatgccgctgagcacatccgcatccgtaatctcccgttttaacttcttctcccgctcctccatcatcttgttgatgacctggccctctttcaggcccccgtgtccaatggatgccagaacggaatcccaatccttataggcataccggttcatgaccttttccatgaattcaggcttgccgatatcagaccagttaatgcccttggccttacagtagcgttctatctggtcccggcctctgacgatattgtcttccttcatctggctcttgaaccactggttaattttattcttagcctgggtgctcttcacaatacccagccagtcccggctgggccccttggagttctgggaagtgatgatttccagctggtcgccgttttgaatcacatattcaatgggcaccagcttgccgttgaccctggctcccaccatcttattgcccacggcgctgtgtatacaatatgcaaagtcaatgggtgtagaaccgcttggaagagtctttacatcccctgacggtgtaaagcagtacacactgtcggagaacaaatccaaatctcccttgaccatgctcaggaattccttggaatcgtccgtatccctctgccactccagaatctggcgcagccagctgagctttgcctcagcgcttcccgcagccacctgtccgcttccactctccttatacttccagtgggcggcgataccgtattccgctgtcctgtgcatctcataggtacggatctgtatctcaaagggctgtccgttgctccctatgagggtggtgtgcagggactggtacatattctgtttgggcatggctatatagtctttgaaacggcccggaataggcttatacatctcatggatgacgcccagggcggcatagcagtctttcacggtctccaccatgatacgcactgcgaacaaatcatatatctggtccagagtcttgttctggttcaccatctttttatagatactgaagaaatgcttcacacgtccgcccaccgtggactcaatgcccgcatcctccatgtggctcttgacctcgtccacgatttcctggacaaaggcctcccttgtatccttgcggagggccactttctccaccaggtcgtaatatacatccggctgaaggaacttaagggacagatcatccagttcaatcttaatcttggaaatgcccagcctgtcggcgatgggggcataaatttccatggtctccctggccttttccttttgcttctccggcttccagtactgacctgtcctcatgttgtgaagacggtccgccagcttgatgataataacgcggatgtcctttgccatggccaaaaacatcttgcgcaggttgtctgcctgaatctccaccttgtccttatcccagtttaactgtgtcagcttggtgacaccgtccaccaggaaggaaacctcagagccgaactccttggtcagctgctccagggtcataatggtatcctctaccacatcatgaagaagccctgctgcaatggtctccttatccatctccagatcggccagtataatagccacgcacagcggatggatgatatagggctccccggacttgcgcttctgctccttgtgggcctcatctgcaatcctgtaagccttttcaatcatggtaatatcatctgaaggatgatatttgcggattgtattaatcaagtcctgatacagcacttcagggctggtaaagtcggccggcgcttccaattcgatatccagtttttcttttgttccctcatttgccatatgttcggtcaccttttcctatggatagtcaagatacattataattttttttatgtaaaaaagcaaggggcgcttggaaaaaagcggggccgggccggaacgcggtcattagacacgctctatactggccctgcctcgtctgttttgtcataaatggcaatcccgtttttctctgtgcgcttcacccggtacatggctctgtccgcccggtttatcaggtcctccatgcgctcggattccctctgggcaaaggccaggccgatagacgcattgatcctgcggctggtgccgtccggcagctggatggagctgcgcccctcatatccggatctcaccttatcctctatggtctttctgtcactgtagccatagaagaacaatacaaactcatcgcccgacaggcggaccgccatgcactgttccccaaaagcaatgccggtcagaaggtccgccatagccttcaggtaatggtctcccatctcatggccataattgtcattcacaaacttaaggttgtccaaatcacagaaaacaagggcattgacccggctcctgtttccgtccagtattttctgcccctcctttttaaggtaggacgcgttgtacaggccggtgagctggtcatgctgggatatattcctgagacgcagtatctccatatatgcgtccgtcttgtcgataacaatgccgaacacgccgtgttcctcatgtctctggcgtatggaaacggccctggtattgcaggccctgtccgtgtaggaaaatccgtcctccagttccataacccgctccaaaccgccaagtatatcctcccatacatcgtagtccaggcagccgtcggaacccatgcggtccgacccaatatccagcagctgcaggatggatgagctcagtttgacccgtgagccgccttcctgatactcaaagctgcccaccttttccccggctgattccagggtaaaggaatacctggaatagctctgctccagctttgcggccatatcgttaagggcctggtggatgcggtctatctcttctattccgctttccctaaaatgaacctcctccgggttctggcaggtaatgtcctcctgcagctttttaattggttttaataccatccagatggctatatacgaaaaaatgatggcaattacgatggacagcagatagacccccgccaccataacaatggtggacctggacagttctgccagctctgagtggtagcacaccgcccccacatacacggaaccgccttccatatgtccataaacctgcaggacgctgcgcacaccgtcgtaggaagctccattatacgttaatgaaatcctgccgccatcttccctgtagtcataatccgttcctatgaacgccttatcccggctgtaaagaatcttttcatccgtcatgagaagtacctgcattcccttgtacggaggattatccaggcccagatacgagtccagcacttccccgctgatttggaaccccatcatccggcggcttccatagacctcctggcttatgacataatacagacggttatcatcaaagaaccattttcccccctttgtcctttctgtccaaaacagttccgcctttgcccattcctgcggcgtcagcttgggactccaatccttggagagggcaatgggatattcgctcttagagcttcccaccacacagtagatatcaccataggcagacgaaaatatctgcggctccccgtcccggtatataacagcctccttctggtccaaatccagataaaagacgccgtccaccgatgatgcgtggtttaaattgtcaatcagtctgtcatgtatcttcctgtcatcctttatctttgccagctctttctccatggtattggcgatgagaagggagttattcatatatcctgatataagtgagtccttttccgctacctgggattccatcaccttataagggcggttggctgttcccgagaaggttccggtcaccatcagtccaaagccaaatataacgctctgcagcaggatggccattaatatggcgttcctcaccctgttgctcagcaaacgtttcttcatgggatatcctccattccccagacagaggcactgtcagacactattcttcaaaaatggtctttacctgttcataaaacgcctctgccttactgccgtagtccatggaagctgccgcctcatccatggacatccccctggccagatactcctcaaactccatacgtccctggctcagcgcctcgctaaagcacgcgtccacccctgtcctgacatcatatgagttctcaaagtcaaacccatacaccatctggtatgaattgctctgcttaagtccggtctcaatccctttcagcaccctggcgtcatcaatctgctgttcctgctcctctgtcatgccgttattgtccacaggcatataggacatggaggtggcaagttcaaagcctttgtcaatggtcagccagtgtatgaaatccagggcagccctgttttcctcatcactgcggttaaacaccgccactccggccccctgctggattgccgtcggggtggtcccctccatcaccgggtattggtagacacctgttgtaaccggtaccatatttccctgggaatcagccacttcttccggaaaatacaggacgctgctgctggatccgatgcagcctgccagataggactgctttacatcatcactgcggtaacggccctttgccccgtaatacccctttgtaaaaggctcataataattcaggaacagcctttcgataatacccttatccaaatccggcaccatggtgccgctctcatcgtaatggtagatgtccgaacccatagcatgattcatagccacaaaatagttggccaggttatctactccaatgaaaggtctcccatccccgtccgtaccgggagtcatgctgtccgtccactcaaaatatccctcagccatccgttccagcccttcccacgactccatgttctcctcccggtattggggattggcgtccaaaaattcatccagcctggtctggttcatgagaagaagctccgtggattttgccaccggcagtatgtaaagctttccgtcgatataaccctcgttaaggtatgcctgattatactgtgccagatctgcctccggcaccacactgcccagctccaccagtctgtcgggatgcagctttaccgtgttgaccaccatatccctgtaggcaagcacaatatttgccatctccacatcattggtggttccgttgagcaccaagtctatcttattggtcaggtcggcgatagagccctggctgtaagcctccacggccacgccgcgttccaggcccagcgtaccattgtactcctttacaagctggtccaaatgctgcttctgggcatcattataatagtgccagaactctatggtcatggcagtgtcgctgtcattttcctctgtcagggcagaagatgcctccgcctgggggatttcagcttttttgttttccccggcacagccgcccgccaagactgccgctccgatgcaaagagccgttattgacgccatccgtaatcttctcatgcccgtaatcctctgtctttctgaaatttattggtctgtttagataattattaatattgtactacggggaaggggtttgttcaaggaaatatcagatgaattttggggttcgtttgatgcacagatataacaaaaaggcccatttttcaatctaatgggccctttctgtaaccaaatctatttcattttcctacttgccttcataaataatcgcagaatccacatcatatcccttcagatgctcccgtcccttcagtcctgccagctccatgacaaagcatatctttaccacctgtccgcccagctgctcaatcagcttgacaattgcctcagtggttcctcctgtggcgatcaggtcgtccacaatgattaccttctggcccggacggatggcgtccttgtgcatttcaatggttgcctgtccgtactccaggtcatattccatggaaatggtctcacagggaagctttccctttttgcgcacaggcacaaatcccttgtgctgcgcataggccaccggcactccaaagatgaatccccttgattcggggcctattaccaggtcgtaatccaggtccttgaccatgtcaatcaggctgtccactgccatgtgaagcccgtctgcgtcctgcaggatgctggtcacatcccggaatatgattccaggctccggaaaatccggtatgcttcttacatactcttctaactttttcatgatggtttcctctcttccacattcagattcttaaccgtatccctgattatcagcttattgttcaggtaaatcctccggttgtccacgattccctcgtccaggcgccgaagcagcaccctggctccctccctggcaatctcccccatgttgcgctccactgtggtcaaatgcatgtccgaatagcctgacatatcccagttgtcaaaacccacaagggaaacatcatccggcaccttaaggccggcctccacaatggctgtcctggcgccaaaagccatctcatcgttaaaacacagcagggccgtgggccggaaggtgagaagctgttttgccgcggtgtatccgctggcataccggtaattgccgctgataacaggaagggcatccggatccagtccgtggctggtcatggacgtcctccatcccctgcggcgcagccggctggaatccaaccccggatttccttctatgatgccgatgttccggtgtccgttctccagcagatagtccatggcccgttccatggcaagggcctcatccgtggtcacattgggcgcgtccacgtccacggcacggcagatgactgacatgggaatctttttgtccaggacttcgttcataaactccatgtcctcgcttcgctgggacaatacgatgattccgtcaaaatagctgggattcagtgttccgggctcatgcatatcaatacctttaaccactacattatacttgcttcccgcaacactgtaaacccctgtcagcacgtcgtggagcacaaacggcgatgtcatcttactgatggtagagaagtacagcccaattacataggatctggattttttcaggttgatggcggcctggttgggcacataccccatctcctgagccaggcgcagtatgttcttcctgctctccgtattctcagcccctatgccgtttaaggccctggataccgtggaataggaaacccccgcccttttcgcgatatcctttatcgtcactgccataatatccccctctttgctgtcccctataagcatttgcatcattcccgttcgggcgtacgaatacaatctaactcgttttccggcttctgtcaaatgcttccgcagacacggccgatattttccgtgatgatggctggaccatcctgtccctccacctttacatccgtaagaatcagctcctcaatctggttggcgtagattcccatgcggcatatatgggagctgcagccatccatcatggcgggctgtccttccctggcagacgccgcataggtgacacggacatgatccatctccacccgttcaatccgctgttccggaagaccatacatgtaggcagccgccacatggcagttttctgcctctatatccttaaagcacaggctcttaatcaaaggtgttctttcatccaccagaagcgcctcctttgtgcgcacatattcgctgtggccgtccggatcacagaaatagaaacagttgataacaaaaggagtcatcacatggtccatgcggatgtgttcaaagacaatcccgtccaccacggcatcctttccccggcccctgcgcgtcttgatgcgcagtcccctgtccgtgtgcaggaacatgcagtccttaacggtcaggttttttaccccgcccgccatctcacttccgatggtaacagagccatggccgtccctcatacagcatctgcggatggatatgtcttttgacggccgtttataggtggagcccatatagatttttcccgactttacggcaatacagtcatctcccagtgagaaatagacaccagcaatctccacatcctgacaggattccgggtccagtccgtcggtatttggcgaatccttgggattcagcaccttaaggtcaaagaaccttaggtggtcggagaaatagggatggatattccagctggggctgttcctcaccgtgattccctgaaccgtcacctgccggcaccgctccaggaaaatcatcctggggcggcaggccgtgtgtattaccttgggctcatgccaccagtttccctcactgtctcccgcgttcccgtctatggttccctgcccatagataacagcgcctttcacgttcacgccgtttatgatgccggtaaacatgggaagaggattgccctcccatgtgcccagattgtattcgccctgctcgtcatagctctggatcattccctggaacacaggaaaacgggtccggtccgtatacgcggacagcaccgccccctcagccagctcaatgttcacatcatcctttaaaaacagggagacaatgcggtaggtcccggccggaatcaggacccggctcttttcagggcaggccataatggcagcctggataaacagagtgtcatcctgaatcccgtccccctttgccccgaaatcgcgcacatccaatgtgacgaattcgctgtccgtggtaaaggaggacttaagcacaagtccctccccgcttctggcctccacctgatagctggtatcaggtttcagatcataaatgcttgtgacagcatttcccgtttcccggataaacttcccgttcagatagaggcggtacatccggctggtctcatatgtaccgccgtcctctatctccagtacggcgcagcgcgcgtttttataaatcacctttaaatccattgccttatacctcttttctgttctgtctctctgtagctgctgtcaaaccaggaatggggcccctcccaggagagcccccatttccatccaggccaaccctggccgttttctattttaacccttaacgccgcctgccgcaataccatcaatgaaagaatcctgtgcacagaagaacacaatcagcgacggtacaatggaaatcagggacatggccaggatacggttccactggaagccaacatctccgtccatggacatgcgcaggtatacggagttcgtatatttctgcatatcagcaatataaatcaacgggccctgaaaatcgttgttggtccacatgaactgaaacagggcgcaggacaccagagacggcttcagcatggggacaattacgtaccacagcgtttttaatgtattgcagccgtcaatcttggcagcttcctccagctccttgggcactcccctgaggaactggatcagcatgaatacaaagtaggtatctgctgcaaacagggagggtacgatcagaggaaggtatgtgttcacccatttccacttgttaaacataatgtactggggcgcattgagaaccacctggggaagaaacagggtggacatcagcagcgcaaagaaaatcttctttcccttaaagtcaaaccgcccgaacccataggcagcgatagtggcggacaccacggtgaaaatcaccttgggaatcacaattttatacgtattaattagggaggtaatcagggatatcttgcctccatagcttttaaaggcattgctgtacccgtcgaacacagggtttttaggcaggaaccatgcactggtaaatatctcggaattggtcttaaatgtggccccaaccatccagataagagggtataccatgataaatcccaccagaatcagcagggtgtagcggattgccgtgctgactttccgttttgtctctcttgtcatatgttcctacctcccttcctcgtctgaataatatacccattttttctggctgatgaacgccaccgcggtcagcgtcatgacaatcaggaacaggatccaggcttgcgcgctggccattcccatcttatggcgcaggaacgcattgttgtaaatcagcatggaaatcagggtggttgcgccgtttggcccgccctttgtcaccaggaacggggcattgaactcctggaatgcctggcagagctgtgtaatcaggttatagaaaataaccggtgtgataaggggtactgtaatcttaaaaaactgggtccacttgcctgcgccgtcaatggaggcagcctcatacaaatcttctgacacgccctttaaggctgccaggaaaatgaccatggcggaaccaaactgccagacgcgtaaaagcacaatcacaaacaatgcgctgttagcgccggccatccagttaatcttcggtcctccaaagaacgtgattaccgtgttaatcagtccgtccgtattgaacacagccctccagagaatggcaatggcgatggaaccgcccaggatggacgggatataatatgctgtcctgaaaaagttcacgtccttcagcttgaagttgagaatatatgcgataaagagggcaaacgccagctttaagggcacgtcaaatattgcgtatttgaatgtcaccacaaatgccctgatgatatcctcatccgtaaatatcttctcgtagttcagaagtccggtctttgttattccgttgaacaaatcatagttggtaaagctgtagtacagcgaagatgcaaatggatataccttgaacagaagaaatccaaccagccatggcagaatgtaaagcaggccgatattcaacgcccagaatcctttcttttttttcatacggttacctccaaacctgttaatctaaatagcgctcatacttctccctgagcagcgtacctgtgctgcaccccttttggatcatgtatgcaagctgctcctgcgggcccggattccctcctgccagcatttcctttaatctcatgcggaatatgtcctgaagcgccctgtaatgctcgtatatttccggggacatctgttctatggtatctatcagcaggaccatctggtccatgccgggcgttttcaaagtcttaaaatatgtaacaatgctgtcgtaattttccctgtgctttactgctttcctaacatccattctatttcctgccatctaaaaaccaataactgtcctgaatcccatctgaaaatcagaaattatagcagtcgtcaatacccttcatcaaatcctctgctgcttcggcggaggtgatgtcgcctgcgctcagctttccaaataccttataatatacaccgtccggattggccttcaggtcattatgctcaaacatggggtccagagggaatttggagtaggccagaacctttgcattggcctccataaccagcttatcaccgattcccttttcctccagaatctttacgccctctgcggagcatggaatgccgcgctcagtgccgcagatttcaattgcctcatcatcatttaataagtaattaaccagcatggctgcttcctttggatgcgctgaatttgcggatactgccagcgccatggaaatcttggtaaagccgccgtcgtaatcaccaaatttaaggaagtccccgataaccagctcctggcccggctttgtggtactctccgcgattgccttctggaccttggaaactgcggagtcccactcaaatacgccagcgtatttgccgtcgattacttttgcgttcttatctaaggaatcggccatatcaccctgaagcgtggcaatggtaggaatcacatgggcctcctccagctttgtcatgaagtccatgcctgcctgaatctcctgggctgtgtactgaagctcaccgttctcaacccacggtttgccgtatacactctccagatagtataccaggaagatggccctgtcgtattccatcatagccagagggtaataatcttcattgtaagccttaaacttggcccccgcctccagaagggaagcttcatccgtaggaatctcacatccaacctcatcaaaggtagtcttattccagtagaacagacgtcctgtcagggcaaccggaaccgccatcagcttgccgtctgccttgcactggtccaggctgtcctgggaaaactgggtcaggtccaggacatcgctgtaatcctccagatttgcaaagttggtcccgttgccgctgtaggatgtaatccagttccagttaatctgcatgacgtcggccgcattgcctccctgaatggcaagagactgcttctcttcccatccggtccaggcgccgtactcgcattccaccttaatatcagggtactttgccataaatgcgtccaccgccttctcagttgcctcatgtctggagtcaccgccccaccagcagaacttgatggtcacgtccccggtgctgctcccggcttccttgccgcctgcctgcgctgccgtggtggtcccgctgccgctgccgcctgagcaggctgtcagtgaaaatgccattacagatgccagggccagggacactgcttttttcaggtttttcttcatcatttctctccctctcttttcatcgccttcgcatgtatgtttgcaaaggtttgcatcattattttaaaaattatgcatatctgccatttgtaagtaattacatttagttcattttaagcaaacatgcatcgtttttctttgtgtttccatagtagcactatttatatcgtatgtcaattgtctgattcgtatagttttttaatatttttttgtttaatatacccaattctttttctgctttttttatgttaagatgaattcaagattaaaaaaatggattttaaggatttaaaagacataatacacttaatttatagttatatccaggatttaattgagctaaattaccgctgttttgtctgcaaacgtttacgattccatttttttacaaggacgccttacatcaggcttcgtgtacatatatgtataaaggagagttaagattatgaaaatactggaccgttacatcgaccagctgattgaacagagcacccctgagtcccctgtatggaacatcgaaaaaatccgggagggttcaaaatccacctggaactatattgacggctgcatgattaaggccatcatcgaactcttccttataaccagaaaccaccggtacctggactttgcggacgccttcaccggccgctttgtgagagaggacggctccattgagtcctatgacccaaaggagtataacctggatcatgtaaatgccggcaaaaccctgttcgatctttacaagctgaccggaaaagaaaaatacagaagagctatggatactgtatacagccagttgaaggaacagccccgcacatccacaggaaacttctggcataagaaaatttatccccaccagatatggctggatgggctgtacatggcccagcctttctatatgcagtacgaggcagagtataacggatgtaaaaactgcgaagattcgtaccagcagttccttcaggtatacgggcggatgagagatcccctcaacgggctctactaccatgcttacgatgactcacgccagatgttctggtgcgacaaggtgaccggactgtcggagaacttctggctcagggctatgggctggtatgccatggcgctgattgacaccatggaagtcatgcccgaatccatggcctgccagaaggcgcggctgaacgccatctataaggaactgattgatgccatgcttccctaccaggaccaggccaccggcatgtggtaccaggtggtgaaccggggcggaattgctcccaactacctggaggaatccggttccgccatatttgcctatgccatcatgaaaagcgtacggctccattaccttcccgaggaatattttaaatacggccaaaaggcatttgacggcatatgcagcacatacctctccgaaaaagacggcagtctccagctgggcggcatctgcctggttgccgggctgggcaacacggacatgcgggagggcacttttgaatattatatgagagagccggtggttgaaaacgaagcaaagggaatcgccccccttatcctggcttacatcgaaaccatgttccgctgccagtcataaggcagcagtatagagcagaggcatagtaccgcagcaaaaagcagcgatgcaaagcagctgcacaaaacaggcggcaaaaatgattgaacccatacgctgttttcagtataataatactggaaacagcttttttgcacatttccccctcttgtttccggaaaggcgagaacatgaatataaaacactttaatattatggttacggaccaggaatgcggacatgcaagggcatccggaaatccggcggacctgactgcttatctgttggatcgcctgccccataagccggagtttctccgcccggccgtggtcctgtgcccgggaggcggatacggctttgtgtcccccagggaagaccagcctgtggccatggaatttctggcagctggatgccaggtcttttccctgcactacagcgttgccccggaaacctttcccgtggcccttatggaactggccaaagccgtggcgcttgtgaaaagccatgcctgtgaatggaacattgatacagaacggattatggtatgcggtttttctgcaggaggccatttagccgcctgcctgggcatgatgtggaaccgggacttcctctacggccccctgaatatggcccccgaggacatacagccaaagggaatgattctatgctatccggttatcacctccggcgaatttgggcataaacgctcctttgaacagcttttgggaggcaaggccggcgatcccagactcagggaactggtttccctggaactccagacaggaccgcacacacccagaaccctcctgtggcacacctggaccgaccagtccgtgcctgcagaaaactctctgctgctggcccaggccctgaaaaaggccggcgtaagcctggaaatgcacatttatcccagcggatgccacggactgtccctggctacggaggaggtttccgacagcaccggagactgccttgtgccccactgtcagggctggatggaactggtaaaagaatggataaaagaaaaggacagggaatgatatgttaaaagaagaacggcaggcattaatcttaaataagcttcactcctccggcaaggtagtggtcagcagactggcagtggagctgaatgtatccgaggataccatccgccgcgatctgctggatctggaccagaagggacaggtcaagcgtgtgttcggaggagccattcccatggagcgcccggtcatcaatttttttgaccgagagacaacggatgtggaattaaagcagcgcctggcgctgaaggcactggactttctggagaaggaccagctggtggccattgacggcagcagcacgaaccttcagtttgccaagaacattccaaacggtcttaagctgaccgtgctgaccaacagctattccattgcccacgcctgttccatgaaggaccaggtggatgtaatcgtcctgggaggacggctgttaaaggaatccatgaccaatgtgggcgaaaccgcggccagccaggcagcgctctaccacccggatctttgctttatgggcgtatatgccatccatcctgaatacggcatgaccatcccctacccggatgaggtcagcataaagagacagctgattcagtcctcccgaagggtcattgccctggtaaatcccataaagctgaatactgtatccagatatcatgtgtgcggcatagaggcgtttaccacattaatcacggacaacagcgtatccggcgagatggctgtggactaccggaacaaaggactggactttttatagccagcgggcatttcatatcacccattgcgattttttgcggtacttttgcggtatttcatttatactccggcagcttttcgtgtgcattctaataaaaatcgcatattaacgcacttttttgcaataatttgcttgacacagcatgtatatgcgctataatacacttagagataaaaaggaagcgggcaggcgagcctgtcccacacattttaggagggtatttactatgaaattttttgtggacacagcgaatgttgaggatatcaaaaaagcgaatgatatgggtgttatctgcggcgttaccaccaatccgtccctgattgcaaaagagggaaggaactttgccgaagtcatcaaggaaatcaccgacatcgtggacggacctatcagcggcgaggttaaggctaccaccgttgacgcagagggcatgattaaggaaggccgtgagattgcagccatccatcccaacatggtagttaaaattcctatgacagtagaaggattaaaggcagttaaggtgcttcacgcagaaggtatcaagaccaacgttaccctggtattcacatccgcacaggctctcttagccgcacgggcaggcgcatcctacgtatccccattccttggacgcctggatgacatctccatgccgggtattgacctgatttacgacatcaccgagattttccagatgcacaacattgagactgaaatcattgctgccagcgtacgcaacccgattcacgtaatcgactgcgccaaggccggcgccgatattgcaaccgttccttacaaggtactggagcagatgacaaagcatccgctcaccgaccagggcattgccaaattccaggctgattataaagctgtgtttggggaataaggaaccgatgtgaggttaccatatcagcattgttaatatcgtatatctaaaaaatggcatgccgggattgacggcatacccatagtaacaaagggccgcattgttgtcttggatgcggcccttcatttatatgtacgtctatgttaatctgtgttatcaactgttctatatcgcagaagcagtcacctcccgcgctgcgtttccggttcttacggacacatctgcctgcccgcgtccgcgtacatatgttctttacctgttatcttcctcctctgtaatcagaatcgcctcccccaaatcaaacaccttggaaaacgcatacttattcttcttagatgtatccatgagcacatagaccaccttggaatggtcttttacaatcacctttttcctggcctctctgtcatcataggtgtagatgcccccgtccgggatatacccgttggcgccaatgaacgccttgtcaaaatacatgtcggatatcatcttttccgtcagggcgcccagtacggattccaaatcatcccgcacttctcctcccagcaggatacacttggcgttcttaattggcagattgtccagcagttccgtgctgctggagacaatggtgatacgttttccctggagatatttgagcatccccaccgtggtagtgcctgaatccacataaacgcagtctccgtcctccaccagcgcagccgccttcctggcaatgatctccttttcctcgctgtgaatcagctttttctttaccacaggctcgtcgaagtcctctgccttatacttaaccgcgcctccgcgcatgacgatgacgctgccttcctgttccagagcagcaacatccctgcgcacagtggacagggaaatgttcaattccgctgccaggtcttttatataagagatatccctctttttgatacttttcagtatctcttcttttctcaactcaggaaccatatgcttacccctttgaactataatagctttattatatcaaagagcccatccttagttcaaccatgattcttgcattttctgtcactttttttcatttttttcaacagaccaaacgcggagcggagactttagttaatctcgttcaagcagggcatggcctcctgcgctcctatttttgtcacagtcactgaggctgcccgggccgcaaatcggcaggcctgaaggtccgtcatgcccttatatttgccatatgcaaatgcccctatataggaatcccccgcccctgtgctctctgttacgtgctccacctttacaggttcaatggcaatcgcaccttcttgccccagaagcatactgcccttagagcccagagtgacaataaccgttccctccgtcagccgcctcagcctgtctgcatgagtccttaccatgtctccgtccgtcacttcaactccggcataaaaggatgcctctgtctcattgacaatcaggcagtctgccatcttaagcacctccaggtccatttccttggccggtgcagcgttaagtatagtgtatacatgatactgtttggccttccggatgatatgttccaccacttccgtaggtatctccagttggagaataacaatcctgctgttcctgataagctcgtccaatccgtcgatttcacgggatgtaatatcaaaattggcacctgtaatgatggaagcatatacagtcccatcctccagggcatgaaccacgcccacacccgtggggctgctgctcctgcctatgcaggaacagtccacaccatagtccttcagtttttccaccaggctgtcgccaaaggtatcccttcccacctttcccaccataatggtgtcgattcccagcttggcgcactgcacggcctggttggcgccttttcctccgccggagtaggttatactgtcggcggtgtatgtttccccctgaagaggcatccgcttctgcttcataatgatatcgtagttaaggctgccgatgacgcaaatgtactctctctcgcaatctctcactgtccagacccccttattcggttattctgcctttgccttcttattcagtctcatggctgccagtttaccctgtattacatccacatataccgcaaacactatgataaggcccgtagcaatatactgccagaatgtatccacaccgcagaccaccagccctaccttcagggcctgtagaagaattgctcccaggaatgtgcctataatgcttcctttaccgcctgccaggctggtgcccccaatggccgcagcggcaatggcattggtctcatagctggctccggccgccggttcgccggttcccagttttgccagcatgaccatcccggcaaatgcaacacagacaccgcagattgcataggacatgattttgttgaaatccacattgacgccggacaggcgggtggcctcctcgttgctgccaatggaatacaggtaggtgccaaactttgtgtgcttcagcaggatataggcagccactgtcacaaccaggaacagaatcatggatgaggacagggtgccgattacatcaccatccatgatatccctgaaattctggggaatattaagtacaggccagccccctgttataagataggcaacacccctgtatacggacatcatgcccagggttgccacaaagggctgcagtttcatcttagccacaaggattccgttcacaagccccagaccaaaaccaatggccgcgcctgcaaggacggctgcaaaagggttcagtcccatgaccaggaaattacccacgcttacgattacaatagccagcgtggagccaactgtcaagtcaattccggccgtgatgatgaccagagtcatgccgatagccagaagaccattgataacggactggtccaggatatcaagcaggttagacggcgaaaaataaatgggctgtatgacgccaaataccaccatgattacagccagtgcagcaactacctctaattcccttgaaaatttctttatcacattcttcatagtcagcctcccatcgcaaaactcattatgacttcttcattcagttcatcgtggttcagaacgcccataattttgccttccctcataaccacaaccctgtcgctcattcctatgacctccggaagttccgaggacaccataataatggactttcctccggctaccagttcctccatcaggcggtatatctccgccttggcacccacgtcgattccctttgtaggttcatcaaatataatgatatcggcgtccgtggtcatccacttcgcgatgatgactttctgggcatttccgccgctcaaactctctgtcagatagtccggatccgcaggatgcagattcatttcccctgtgtaatacatgcagttgtcatatatcttcccggcattcacaaagcctctgctgcaaaaccggttcatggcggccagggccatgttgctggcattcgtaaagttcttaacaaacccctgcgtttttctattctcaggtatcagccccagactgtattgcagggcatccttaggactcttaatttccgccctttttccttttatgtaaacctccccgctggtataggggtctgccccgaatatagcccgcatcacatccgttctcttggatcccaccagtccggcaaaggacaaaatctcgcctctgtggagctcaaagcttatgtgttcaaataccccgttcttgcacaggtccctggcttccagcaccacctcaccggcggcacacaggggattatttcttactgcataagcggacacatcccggcctaccatgtggcgtatcagctcttccttggatgtctccttcatgttcagggtagtgatatacgttccgtcgcgcagaatactggccctgtccgctattgcaaatacctcgtccaaacggtgtgtgatatacagtatcgtaattccctggtccttgagttccataatcatcttaagcaaacggtctacctcgcggtctgtcagggctgacgtgggttcgtcaaaggaaatgatttttgcattatgaaacaatgccttggcaatcagaatcatctgcatctcgccagtgctgagagaggtcacacggtccctgcttctgaatttgcagcccagcctttccaggataacatccgtctttttgtacatggcatcgtagtccacaaaaaatcccctggtcacctcgtagccaagggctatattctgccctaccgtcagctcagtcacaaggtttacttcctgatgcaccttggcaatgccgaattcgatggcatcattggcatttttaaagcccacttttctcccgtcaatctccacatttccatcgtaatcaggatagatgccgtgaaggatattgagaagggtagatttacccgcgccgttttccccaaggagggcgtgtatctcccctttatccaccgtaaaatccacactgtccagcgccttgttgccggggaactgctttgttatattagaaaaatgtatcattgtcgccatattcaatcccctctttgaaatatcagccaggggtctgaccctctggctgatgatagtttccttgctgccttttgtctattttgcatatacaggatctgtccagccgatgatttcctctgccggcttatctacgttctcggaatcaatgagagcctgaggcgtccacagcaccctgggaatctcctgtccgcccagtcttctgagcattacttcacctgcaatctgagctttatagaacgggaatgaatcaatagtggcatccagctcgcccctgcggatggaatcatacgcctctcctataccgtcaacgccaaccaccaatatatccttgccggatgacttaacagcctccaccacgcccagggccatggtatcattgttgcagaaaatggcattcaggtccggatactgtttaatccatgtgtcagccaaatctttggatttctgacggtcccagtcagcattctgctttgccacaatctcaatgtcctttgcgttggccgccatccagttttcaaagccttccgtcctctgcctggccgcaaacgccttaggcataccgatgacgattgccaccttgcccttgcctcccagcttatcagcaatccactccgctgccagctctccgttctggtccgccttaggacctacaaaggaatccgcattggcaatcaggccgtcattcacattgatgaccggtattcccgccttcttggcatcctccacaccgggtgtcaggtttccgtcggaaataggcgaaaggagaagtcctgtatacttcttattaatcatatcctttacaatagaaagctgtccctgttcgtcgttttcaccctgggccgaggtcacgtctatggtgatattgcagccggcggcggctgcctttgtctgatactcgccgtacccctctctcagggttctccagtactcattatcaaaggattttgccactgctcccaatttaacctcaccgtcctgcttcggaacatcccccagcttctctctcaattcttcaatgctgacccctgcctccttatccggattaaaggtatcggcagcagcctctgtctgcgccgtggcggccgcctgcttattagtacatcctgccatgagtcccgctgccatggcaattgctgtcacagataaaaccaaacctctctttttcatcttctcttctccttttacattaaaatagtttttgtttataataaagcaaccatcatgctgcttacagctaccgcatcgttctgttccaccaccttctccatccggcagagtccataggcgtcaataagctgttcaatccgccggcacatctttatatttgcctcacattcttccaccgccttctcccgctttggaaatgtgtcaaaatatatcacaccctggaagtcatattttttaaggtagtacatgacctccactgtcttccagaaattcacggttcccaccatcaggccgtcatccgtggaaccctctccgtcattgagatgtatattgtagagtttcccccgctccagcagccaggccgctgcaaacgcgggattctccttcttcatcaacatgtggcagaagtccagggtcacccccaggttttccctgtccacatcgtggagaatggaaaccgcagttccaaagctgtcaataaaagcgtggaccctctcctcatagggcttgtactcaatgctcacaggcaccttggaatagtcgcacacatcccggaacgccttcacaatccggttccagtagcttacataatcaatctggaaggaataatcaaaaccgtcaaatcccagccatataatcatctggtttcctcccagctttctgcacgcatctgccgcctccctgcataaagttatggcgtcctgcgatatggccggctcatggtttccgaactctcctcctatgtacttgtccctgaacctgagattaatggcattacatctcagtccgcattcctccatctttgcctttatcacctctatatcataatcagcaaaatgttccggataattcaaatccacataatccactccttcaatggagcctatggaacggaatgcattcagcaggttgctgtcaaatctcaaaaacgagttaatccgtgtggcatacttcatatgattgctacctccttgtagcatcataatagcatttgtttcaaattatgtcaatacttttcaaaatattttattttattttttggcataagtttctatattttttcatttatattcagccgtattctacattttttagtttgatacatagatttatacatcattcaaggaggttttaactaattcaatgactgaaacacgaaaaccaatgtaactctgcttttttgttatttcactttttttcatatgttttcatttcgaggcattgagcaattgagcagctgactatttaagggggttttctctgataataatacaaatgccgcagaaccatgctggacttacagcattgctctgcggcatttatcctattttaagtttttaacttagtttgaaaatgtccttcattgttattaagcctgatatcctcataacaggcgccgttccatttatccccaataaaaactttttggtttatctacataattctcacattcttaagcgccccggtcttggaaaactgggtccactcacacacgtttaccgcatggtctcctatccgttccagatacttggccaccatcagcaggtcaattccctggtccgcctggtccggggaggatttaagcagatgaatcacgtcgtccttcacctgattgaacagtgtatccacctcgtcatcccgttcaatgatttccatggcagaatctaaatcctggttgatgaatgcttctatggcgtcatggaccattgcgttggcggaagccgccataaccggaagatgcttaacaatgtggtatgcgtgctcgctttttatcctcagaatcagctcagcgatatccgaggcatggtcccctatgcgctccaaatccgtcaccaccttgagggcagtggatacctggcgcaggtcgctggcaaccggctgctggcgcagtatcagggacaggcatctggactcgatggcccgctccatatcattgacggtcctgtcgcccttaatcacatcctcagccatcgtataatcctggtcctcaaatgccatgaaggtctgctcaatagcgctctccaccatatgggccatttcttttaaatcctgttttaatacttctaactcatgttcgtacgtaaccctaacgctcaatctgataccttccttctgccatcatccgaaacggcctgttatatagtcttctgtcctcttatccttcggcatggtgaaaagttcgtccgtagtcgcatactccactacctctcccaccaggaaaaatgcagtgtggtccgctatacgcgtggcctgctgcatgttatgggtcacaatggccactgtatatttactctttagatcatccatcagatcctcaatcttcagagtggatatggggtccagggcagacgtgggttcatccatgagaaggacttccggctccacggccagggccctggcgatacaaaggcgctgctgctgtccgccggacagtcccagggctgatttcttcagccggtcagagacctcatcccacagagccgctcccttaaggctgttctccacaatctcatccagctgggccttattcttaatgccatggattctcggcccataggcaatgttgtcatagatactcatgggaaaggggttgggctgctggaataccatgcctattttctttctcagcagggtggtatccacctgggaatcataaatatcctcatcatccaggagaacggtcccatctatcttaacgcccggcaccaggtcattcatgcggttcagtgtcttcaggtaagtggacttgccgcagcctgacggccctatgaaggcagtaatcttatgttcatacaaatcaaggtttatatttttaagggcatgattctccccgtagtacaggttcaggttccgggttgaaatctttgttttgctttccacgctttctctcctttgctaattgaaatggtccgccccatccctatgccccggcttccacattgaaccggtgggacatgtattttgccagaccgttgattcccagcacaatcaccagaaggaccacggccacaccaaaggcctcattatattttgctttctgcataaacagatagagctgtatggtgagggttcctcctgattcaaatattttggaaaacagattctttggaaggtaataaccgcttcccgccgtaaacagcagagctgccgactctcccacaattcttccgatagccaggattatgcctgtgagaattcccggcatggcgcttggaagcaggatagtccgtatcatgtaccactttgtagctccgattccaagggctccatggcggtagctgtccggcacagtcttaagcgcctcctgggtggtcctggttataaggggcagaatcataatggtcagggtcagggctcctgtaaggatagaatatcccagtcccaaagcatttccaaaaaacaccattccaaacaagccgaatataatggacggaataccggacagggtttctgtggtaaactcaatcagccgcaccacttttcccggctttgcgtattcgttcaggtatacggcggatccaatgcccaggggcgtggcgatgagcagggtaatgattacaatgtacagtgtgtttataatatttcccaggattccaaaggttccctttgtggcgctggaggcagtactcaaaaatgcccacgtcacatgcgggattccacgcacgaacacataccccatgatgcctgccagaagaaggatggagaaacccgcgcaggtatatatgatgaccgtaagaaacacatccaggccgcgcacgcgcctgccgtatatactgtcctgcacaacagagtccttatgaacccggactgcaatatcatttgtcattcctgtttccccctctctttaaaatcctggtcaggcttatgttgataatcataatgaatgcaaacagtaccaggccgatggtgaaaagcacctgtctgtgaagtcccgaggcataccccatctccgatacaatggctgtagtgaggaaacgtacagagctaaagggaaggggcaggtttacggagcttcccgacacaaggctgatggccatggcttcaccgattgccctgcctgtacccagcacaacggctgttatgataccagatttggccgcaggcacaattacctggaatatggtctgtatctttgtggcgcccagagccagggacgcgctctttagatgggccggcacagacctgagggcagattcgctgatgtttatgaccgtggggagaatcatcagggccaataccagcacagctgatatcagattggctccgccggtaaactgatgtgtttcagaccctttaaacagtatcagttccattttgtacatcagggggttaagaatcaggattcccagcaggccgtatatgacagaggggattccggccagaagctctaccgccggacggaccatgtcgctcagccgtttgggggctacctccgccaggaatatggccgtcatgacgccgataggaactccaatcagaattgccacaaaggttcccacgatggaggtcagtatgacaaacagtataccgaagctgggggatgcggctgcgggctgccacacggtcccaaacaaaatttccagcagccccactttaaacagcgcaggcgtaccgctgataagcatatacagtgtgatggaggcaacagccaatacggcgaaaaagccgcaggcagtaaagatgccctgtgcagctttttcgacagtggacttgctgccatgacaggatcgtatggaaaatgtctccgctctcatgcaggaagtctcctttctctattccgattatttgtcaactgcaatcagtcccacggacttcactatctctgcgccttcttctgagtagatataatcgaagagggcttttacaaggtcattctgctcgcttatttctcccttggtagccattacaaacggacggcttaagaagtaggagcctgccttgatgttttcctctgtaggctcagcgccttccagcttcacagcctttactgtgtcgtccagtacatccagtgaaacatagccaatggcgcctggtgtggaggccacctttgccatcactgcgccggtgctgtccagctcattgctgtatttgcacacgtcctccagctctaacagctcctcgaaggcgcttctggtaccggaaccggattcacgtccaaccactacaatgggagcgtcatttccgcctgcatccttccagttggtaatttttccttcatagatatcggacagctgctgtttggtcaggtcctccaccgtattggcggcatcaaccaccactgcgattccgtcaatggcaacaatgttttccgccacgccgtcagccttctcctcatcctttaaattcctggaagaattgccgatatcagctgtcccgttgctgacagcctccactcctgcgccggatccaacgaattcagcggtcaccgtcacacctgggtgcttctccataaaggactcgctgagcgcattggcaaacttctccatggaagtggatcccaccatactgatggtgccgctcaaatcagcggacggggcattctctgcctttgctgcttctgtgtcttttgtgtctcctgacgcagcagaagaccctgcatctgtccctgcctcggtcgccggggcggctgtccctgctgcggttgtctccggggcgctgctgccgcagcccgccaggatacccatggccagaaccgctgtgcctaacagtaccgttaatttctttccattcattctcataatacgtttcctcctgaatcatatcgtttattatcatgttttttgttatcttttctacagtttggagtatacataaaatttacatccggagaaatcataatatggtatagtttatgtaaaatgtgtgtaaaaccgcagcccatgcccggcgcccccagagccgccagaacatatgaaaaaggtgtccgcccccatggcagacaccttttttgtctctgttttattcctgtttcagcccttacagacagcctccactatatgttccatctctccccatttcttttccatatcttccaccagccccaactgggtacggcagcgatccagattatgcttctccctggaaatcttaaaataagtgtcgccggacagatagtccgtaaggaaccggattccgcattccagagtcatgagcctggctccctgaggaagcatcttaacctctgcttcggtaaggcttcccgcgcatccctccagaaatcctctggtatagatttcaaagagaggaacggacagggatactttggttaaatccgtttcatcctcctctgcggtattggcgccaaagcggatggaatctccgaaatcaaagatggaaagacccggcattaccgtatccaggtcaatgatgcagatggcctggccggtcttgtcatcaatcataatgttatttaatttggtatcattatgtgtcactctcaggggaagctcccccttggccagcatatccatggccaggcccatatcctgctccctgtccatgacaaactgaatctcgttctgaacctctgacacccggccgcagatatcctcctccactgccttcctgaaagcccggaagcgtcccggagtgtcatgaaaaccagggatggtctctgccagctctctggccggatagtgggctaacagtctctgaaaatgcccgaaggccttcccgctctggtaaaagtcctccggcttctccaccaggttatagcaggtggctccctcaatgaacaggtacatcctccagtaatttccccggctgtccacatagtaaggggctccctccctggtcctgataagattcagagtctcccggtccggatctccgttatttttaatgacctcctgcctcaggaaggtggtgaccccctcaatattccgcataagagataccggatcctgaaagatatccgtattcatcctctgaagaatataaggatgtttctcacatatgagacggaaggtatcattgatgtggccgctgccgtagcgctggcagctgactgcttccccatccgtggcaaacgctgcggccgcctcctttagtatatgtttatccatttctccgctcattttaccagttcctcccaaagtttctccgggtacaggcccttatccttaaggtccttaatggcctttaccactgtctccttatcttctttataggtaactccataccagcggtccacgctctttagcacagtcacctgggccaggtctgccttcagaagttcatccaccacaaagggcaggaaatattcgcacttcataggatttacaggaaggtttttatccaggaaagccccgaaccggttctccagctcgcccagaatactctttgtaaatccccacatgttcatggaaacaatggtggactccggaagttctgtccaggtagctccgtcatcctctgtatattccgcctggctcccatgcttttcaatcctggtccgctcatgtatatccaccagtcggctttttgcatctgtccggcatacgccccttgccacatacccattctctgtcagggtattgtacagcttgtagcccaccatggtatattggtatcggtccgtgtcctccacagaggacagctggtcatatatcatgtgaaaggcttcttttccataataatcatccgcattgattaccgcaaaaggcccgtcaatcaaggcactgcagcaaagcactgcatggcctgtgccccacggctttaccctgccctcaggcacctggtatccatccggaatcttatccagctcctggtaaacataggccacatccatatatttactgattcggtttccaatgtgaatcttaaaatcttcctcaatggccttcttgataatgaatatgaccttttcaaatcccgcttccctggcatcaaatatggaaaaatcaatgatgatattcccataagggtccacagggtcaatctgctttaatccgccgtaacggcttcccatacctgccgccatgattactaatactggtttctgagacatgctgtccttcctcctcacaagatatatccttattccttcacgtttcctgttctatcctatcccttcacgccgcctccggttacgcctgctataatcttctctgacaggaagatatacaggataaaggtgggcaggaatacaatgacaacagcagagaacataccggcccagtcacctgtatatttcatggagtttatcatggaatacagccccactgccaccggacgtaccttgtcggaatttccgaatatcagggagatgaaatactcgttccatatattgatgaagttgaatatggttacggtcacgattcccggctgggccatgggaagcataatcagccagaaggtcttaacaggggggcagccgtcaatggcagctgcttcctcaaacgccctggacagattggcaaaaaaggtggtcaggaaaatggtggtgtagggcacattgattccgatatacaggaatatcagagtggcccggttggccgaaacattattaaggatattgagacctgccaccacggcaaacagcggaagcacaatcatgactaccggaacacccatggacgccacaagagatgactgtattagtttattgcacacaaagtcaaaacgtgacagcgcataggcggcaggcgcgcaaatcagtatcagcagggtacaggataccgccgcgtaaaataaggaattgaagaaaatggtggagacattggaattgacccatgccttcacataattttctatatggaatccgctatccagcagcttattgctgaatatctccttggtggtggaaaagctggccagcaggacccagcccagcagggccagggtaaacagaatccacagggtaagaatcaggtatccgggggcaagctttagttccttcttccagcgcaccggttccctgtgcagtttctcttttttctgaaataatcccgacatatgttttccccctttcctagaattccaggtctttatcctgaagcagatggttgcagagccagaacacaataaccacacatacgctcagcatcacgccgacagctgctccaaccccggaattgcgctccgtgacgctgttgcctgccccaaatatctgcatgtacagataaaccatgggggtaatggtctgggtatcggccgttaccgtggagaacagctgggaccatacgaaaaatcccacactggtaacgctccacatggtgacattggttctgaacactccctttagcagtggtaatgtaatatagcggaactggttgaacttattggccccgtccagagtggccgcctcaaaataatcgtcgctgatgcgctcaatgccgctggcaaatatcagcatgtgataacccaccatgccgaaacagtaggccaggagcagagccatgaacttgtggtcattatccagccactgtatctttgccagggaatccaggcccaaagcctggaagaaatttttaatcagtccgtacttggggctgtagacatactgtagccacatggtcgccagggccactgcgctgacaatattcggcagataaatcattgccctgaaaaagctcttgaagcggatgccgctggtaatgataacggcaaacagcagcgccagggacataacgatgataccgccgataaaccatatccgggccaggttccacatggagatgcggaacaaggtggtatttgccagcttcacatagttatcaataccgctgaaggtccattttgacatggggtccgtgattccctcaatcttgaaaaagctcataaggatagtcctgataatgggataaaggaataccaggacgaacatcaccaccgccggtgtcatgaacacaattaacattcccttattttttttcacgccggttcctcctaacataaacctggtccggatacgctccggagcccaaaaagaggcggcagcgttatacgatgccacctcattgttgcatattccgtggaaaatgttttgaatgtgtttatctgattactttcctgctgcctggagattggatacaaattcatccgctgtaatggctccgctgcaaagcttggtcatgttctctttgatgattggcgtcatatccacattgtcctctgcgccggcagcccatggataacgtgtctttaagctctccattacaggcttcacgtctgtaagctgtacaggccactctgaattggtggtatcggacgggattcccagggattcctcagagagcttcttgtcaaactcacccttggtaatataggtaatcagcttaaatgcatcctctgcgtgctgtgagttcttgttgatagccagaacctggccgccgtagtttgctgcttccgtaccgtctgtaccgccttccactgccgggtagctgaagcatccccactggaagtcatcgcctgccatgttctttacttcgtttggaagccaggaaccattgaggtacatggctgctgttcccagtgccagctcctggttctgtccggccgggaatacgttggatgctatgttttctgagaaatatcccttctgcgcaaaatctgcgtaagccttggctgtctccatcacagacgggtcatcccacttattgttctttacaatatccgatgtcttgtcatagccgttgagtctggacatatggtatccgaagagacaaagtatgtatgcgtcgtcacatgtaataggcgtgtagcctgcgtccttgatcttctggcatgctgcgtccagggcaggctgtaatccctcgcggataccggtacgtcccttaaactgtacatctacagccactcctgtgtctgcggaaaacttgtcaactgcttccttgattacctggccctgaggctctgtggactcccacatggaccagtataccagacctgtgccgtctccggccggggcctgggcgtccgctgccgccgtggtgtctgctgccggagccgctgtggtgtcagccgccgctgccgctgccgtggtatccgcggtgccggacccgccgccgcatgctgtcagggagccaaccatggctgccgccaatgccaatgccatccattttctgtttttcataaaatacgtcctccttgaatcttattgtgtttttgccgattcacattcactaccgataatccaattatagtaaatatgcacataaagttctttgcactataaatttatttatttgtacaaaaagactttttctatgtataatacacaaatatgattctgtctccgaacgcttgtaagtcattttgtatacttgttaaagactgccatatttagttcattccaggttggccggcttataagtcaaaccattttatttcacagggcagcagctccatggatgtcccatgtccatccccgtcataaaccaccgtggactgcccgcggctggtgttgttgaccaccgcatatttccccgcctccggatatccgtgtacctcgcagaacagattatccgagaaccacttcttcatttccccctctttgcaggccgcataatacatacttcttataagaagcctggtattctcatggctgtaaggaagacccgcaaggtacacgccccgtccccttccatatggatgggcgctgaggtggacttcatggtctgaatattccccaatctctgtatccgttcccaaggcatacacatttttcatcccttcgccaaaatccagaaccagccttcctgattcatcccttggaacgtcctgtgtgataaagtggctgtctgcctgtgttacatgatacttgtccgttgacagggtgaagccctgctctttatccacccccagcacatctgccagctggaaataccgtccgccccgctgcacggcgctgggctcgcccactcccacaaagccgccgccttcccagacaaaccgcctcactgccgtgacaatctgctcatccagccactcatccccgccagaccaggccgtgcccgcatcccctgcattgatgatcacatccacatcctcaggtatacctgaactgcgtatatcgtcaaagctcataaataccacatccacacctgccccgctcagtgcctccagaatgccgaaataggtgtaggtctgcttataccacagggcatgggccaccatgtagggctgccaggagcgcagctttccccaacagttcaacacagctgccttcagcccgcaaaaaggcctgcttcctccgatatttccataaatttccctgaattcttccgcaaccttctcaatgtaatccacaaagcccggaaatttataggccaggctcagatatccgccatacccgatacgatcaaccggtttgcgcatcagagctcttcgggcgcaaatccagttttccaccgcctcaggaacaggatcatttccctcataaaatgtgtcagggaaaaaatagggaaggaaacggccctctgtatagctcacccccggaatatcggagataaggcgcagcgttgccccgcctcccacgcttcccaccacggcgtccaggccgatttccgggaaataagcgccgtaaggctcggtaccaatccagttgtcgcctaaaaacatcatggccttacgccctgcctgatggaccagctccaccagctccctggctttttccgccacaaagcgctggataaaatccatataatccctgtactgtctggtgggaacccggaaggaagaattatagtacccattgtccacaatgtcctcaggtctgagggcgtagccgtattcggcctggaattcctccagcgccttcacactgacggttgctccgtatccgaaccagtccacgaatttttcctttgcgtcgcttccgaacaccagcgtgaaatggtaaaaaaatgtggtgaagcgcacaacatccgtatccgggttatcctttaaccactgtaccaggtactcccttgcaaacaggcctgaagcctcctggcgcacatcaaagggaatctcatggggtttatccccccagttattcgttatgtgattgtacatctgggtagggtcccacaccgcgtatgccaggaaggataccgtatattcgtgaaaaggcgacgcgtgctccagcaccacgcgcatgggggcggaaacagcttctgcttttttggtttctgcggtattcccggcgtctgcggcgtttccggcgtctgcggtatctccggcgcctttaaacacacccttaaactcactgccgctgcaaaaaccttccggcatggacgcccctgtcagctcccactgggagacggggactgcctggcctgtggtgcggtccatgacctcccaccatttcttagggtcatggtaacagtccggtaccacctgctggtcaaaatatccttccataaagtctatctccagatggtttcccactgctgtaaaacgccgggacataaggtagagctgctggcattcctccatatgcttagctgcaaattcattgtgtcctcttgccacaaaataggtggtataaatttccgcatccagagacttgacatccttatccagctttgtcccgtcactgtcgcggatggcatcagcgccccagcgctccattaactcctttgtctccttcaaaaaaccggattcactgggaagtgtaacccttcctttcgtcttagacatgtctgtatcctccctctaatcttcatattggctctattccataagcctataactcttgatttcgtttaaataaagtatagcggatcgctttttttgtaacaagacagctgaggggattttatttgcacattctatcattttatttgcatgattgtattctgcagaattaattcctgtgatataattcaagaagataagacagtttcagaaaaagacagtgcgggaggaaagattacatggcctataaaagtgtagttctggaggacagtgttaccatcaaccggattatctccgtccactatttccagtatatgagcgacttctcctttcccggggaaagccatgacttctgggaactggtatgcgtggaccgaggcgaaattgatgcgttggcaggagaccggcgtctgaccctgaagaaagggaatattctgtttcacaagcccaatgagttccacaacgtactgaccaacggaaaagtctctccaagcctggtggtcattgggttcgagtgccattcccctgccataaagtcatttgaggatcagctcatgtcggtccaggatacggaaaaagagctcatggcccaaatcatcgtggaagccagaaacacattcagcggaagactggatgacccttaccaggaggagcttatctttaacagcgaacccctgacctttggttcagcccagctcatcagccattatctggaacagctgatgattcatctatacagaagatatttttcctactccctgccagtacgttcttcccgcttcctggccgaggccagcagcgggaatgatacctacaaccgaatcgtccgctacatggaggagcatctgggcgaacgcatgaccatagacagaatctgccgggacaacctggtggggcgctcccagctgcaaaagctgttccgggacacaaaaggctgcggggtcatagaattcttttccatgatgaaaattgacactgccaaacaaatgatacgtgacaaccagctaaatttcacccagattgcagaccgcctgggatacaactccatccactatttttcacggcagttcaagcagattaccactatgactccgtctgagtatgccacctccatacggttgttgtcggagaagccttaggatatctcaccggccgtcatttcttatcagataaaaacagccatccggaagcataagtgttctcccaaatggctgtttttatctgtcggtttacaacggctcaatacaatagccgcttcaaaaaatctattagcgggctctgccaaaccgtcagctcttctttataaaatccgtcccgcacttcggacagtgaacgctgaccttcccgtgccccctgggtatgcgcaccttctgtccgcagtcagggcacttaaagatgcggtatttccggccctccgtgaaacggaatttgattttcctgaaatattccgtcacataaaaccgcaggcgcagataaacctgattctcctggtagcgtttacccacattttttgaaaacatccggaagtacagcaagaaaaaacctgccagctccaggatatacaggaatgaggacaatatcctcaccctgacaacaacgttcaggaaaatcagcacaagcacggtatacattataaactggccaagctggtccataccatatcttcctatcatgaaacgctgtaatttttctctgattttattcatctgcaaacaatcctttccccattatccggcctgctgccaggtatatttctcaggcagccgcggatcattcatccgagagtaactataacctaattctcatgggaaagcaatgtacagacagggttttaatgattattttataaatgcaggcgtcaaaatggaggccgcaggccctgagcgcccagacctcagcccaaacctcagcccgtactcggctgcggacaaaatatgcagataaaataattttttccaccttgacattatatttcccatcccctataatcagaattggtctgaggactgtaatacacgatataagtacaatatagtaaagagaaaggtggctaactgaaatatgattattagatgattgaacagcagcagatgatttacacactctctttcctggcaataggaagccgggcagaatttgtgtgtctttgtcatttcgttcagtcatacagggaatcatattccataaggccatatttttatataacggggtgcatctgtctatccatatgcatccgctgcagcggacaggcatgtcccggcaggcgcgcgtaagctgctcctgacctgtacattcccgctccttctgcctacaactggcccggtttatatcccttctgaacgaagtgcgtttaggagggatttttttatgttgttaaatgcactgaatgttaaaaaagaatatggaatccagaccgtgctggatattgaaaaactggaaatccgggacggggacaggattggactcatcggacgcaacggggccggaaaatccacccttttaggcgtcctatccgggagaatcgcctgcgacgagggcgtggtaaaacggtattgtcccattgctgagatcctccagaccggggaaacagaggatgaacccgaggccaggcttttaagccaattaaagctgcgcgacagcgcggtaaaaagcgggggtgagaagaccaggcgcgccattggggcagcattttccagccaggcgccccttctctttgccgatgagcccaccaccaatctggatatggaaggcgtggagcttttagagaaaatgatgaagggatacaggggcgccatcctgatgatatcccatgacaggacccttttagaccgggtctgcaatcagatatgggaactggacaagggaaacatccgcgtttttgacggaaattactccgactgggccgcccaaaaggaacgggaacggggcttccaggagtttgaataccagcagtaccagaaggagaaaaagcggctggagagaactaccgatgcattgcagagaaagagccagacaatgacaaagccgcccaaacgcatgggcagcagcgagtggatgctctacaaaggcgtggccgcggttcagcagggtcatgtccaaagcaacaaaaccgctgtcatgagccgtctggagcacctggagaaaaaggaacgcccggatgagctgccccaggtgtccatgaaactgccggatgcaggaaaaataagggcaaaaaatgcggccgccatccggcatctcaccgtgagttacggggagcgcattgtcctggataacgtgagcctggaaatagaggctggcaggcggacctttatcaccggcaacaacggggccggaaagtccacactaatcaaagccctgatagacagggcacccgaaacctttattacctccgaagcaagggtcgcctatttttcccaggacctggacaccctggacccgaagaaaaccgtgctggaaaatgtgtcggaggatgcggcctatccccagcatatctgccgggccgtcctgtccaacctctatatgacaaaggacgatatgtttaaaccggtcagtgtactatcaggaggagaaaaggtcaaaaccgccctggccaaggttctggtatcgggctgcaacttcatgatactggacgaacccaccaaccacatggatgtgtataccatggagggcctggaacatctgctggagagctacgacgggacactgctggccatcagccacgaccgtacctttataagccatacaggggatgtggtctgccggcttgaacatggagacatacaaaaaagcactgaacaataaacaaaaatcccggtcagcgggaaatattaaccgttatcttttcttgacaataacgcttttccattatatgataggcttactataattatccagatggaggagacgtattatgaaaagaaatgtattggggattttactggcaggcgccataggcgctgcccttatcacaggctgcggcgccgcatcctccggcaccgcccgttcctctgccccgcagcagacacaggaatcagccccggaggatggcgatgccggcaaatcagccgcggacaccccagacctgacaggccataccctgatgatctactgcggggctggcatgacaaagccgttccaggaaattgccgacagctttaaagctgctaccggctgcgaaatgaacgtgacatacgccaatgccggccaaatccagtcccagattaccacctcggaagaaggcgacatgttcatagccggttcagccgaggagctgaaaccagttgagtcctatgtatccgaaagcaaggcactggtaaaacatatacctgtgctggcagttcagagcggcaacccgaaaaacattacttccctggccggtctggcagaagagggcgtgtcccttatcattggcgatatagactcaactcccattggtaagattgccaaaaaggccctgactgatgcaggtatctttgacaaggtacagatagaggcatccactgccacggctccccagatggctaccgccattgccgcgggagaggctgacgcagccattatctggaaagaaaactgcgatgctcagggcgttgaaattgtagataacagcggtttggaagattacataaaaaccatccccgcggcttccttaagctgctccgcggatcacgacgccagacaggcatttctggactatttaaattcaggggacgtacaggaaatatggttgaagtatggatatgagattgcagaataggcatagggggcataggggaacagacctgttctcagccatgacggtcgctgtggcgctgctggtgatttttttcatcggcagcgcggtctgcgcgattgcagccggagggattcccgcctttgccggaaccatccgccagaaggaagtgctctttgccctgcgtctcagcgcagccaccgccagtctctccacccttattgtgatggccctggcacttcccaccgcatatgccctgacccggacctccatgccctttaaggagctgtcgggcatcatcatcgaactgactttgtccctgccctacctgcttctcgggctcagccttcttatcatgttttcatcaccagccggcaaatggctgaaggaacagggctttaaggtggtgttttctcccgcgggcattgtcatggcccacatcctggtcaacctcccctatgccatccggctcatccgcactgcctttgaagcatccgaccagcggatggaattcattgccctgaccctgggggcttccccctggagatgttttctgaccattcttcttcccctttgccgcagaagccttgtaagcacctttatcctgacctggtccagagccctgggggagttcggagccacccttatgctggtgggaattacccgttttaagacggaaacactgcccggcagcatctatctgagcatatccaccggcgacaaccaggccgccatggcaactgccatgctgatgctgataatttccgggctgactctctttctctcccgtctgcttgccagtcccgcggacagaaacaaaaggcaggtgttcatacgatgaaccaactggttatcaacaatttttccgtaaaaagaggcagttttacactgtctcccatctcccttaccatccaaatgggggaaatctttgccatcctgggccgcacgggttccggcaagaccgtactcttggaggccatcagcggcatgtttcccggtgacaccggcagcatcctccttgacggaaccgacatacgggacatacctcccgctcagagaaagctgggccttgtgtatcaggactatggcctgttccctcatatgaaggtaaaggaaaatatttcctacggactgaaaatgcacggatattcaaaaaaagaacaggacagccgcgcacaggagcttatggaaatgctgtccatttcccacataggggaccagtaccccggaaccctcagcggaggcgagagccagcgcacagccctggcaagagccctggccctggctccccaggttcttttgttagatgagccgttttcagccctggacccggccacccggcagtccctgtatcaggagctgcgccggattcaccggcattttggctgcaccatcatcttcgtcacccacgattttctggaagcccggactcttgcaggccgggcagccatccttctggatgggaagctgcagacagtcaccgacacctcccggctgatggacgggcatttttccgcagaggtggagcggtttctgggaagaaatcaaatcataactgcgcctgagcgcaaacaggaaaagaggattgtccaatgacatatatgaatgatgcgctgtcattttacagcgaattaaggttgcgtttcatgaagcttctgacagaggaaggaattctgggcgagcaggtggtaatcaacacaaagtccctcacgccggaggaagccatcggcattacaaaacgaaaagattttcccatcataacgggaaaggatgtgatggttcaggcagaatgcatgggctccctgggacaggcgtttaccgacgccccctctgcttatcgcggcacgttggaagaaatatgctccctggacctggcagatgacccctacagccgcggattgttcatagctgccctaaacgctgtcatgaaacactcaggcagggcggactgcacggtccactgccgcaatgagggacctgagtcctgcgccatggacgtggtccgttatatctctgaacactacggccgccctgccattgcgctgataggataccagcccgccatgctggaacagcttgcaaaggaatatgatgtcagggcagcggatttaagcccggccaatatcggccagaaacggttcggggtccttattgaggacggacgcatccctgagaccagccagtccctgtgccgtaaggcagacctggttctgtgcacgggaagcactgtctgtaacggatccatcgtggactttcttccatttaaggaaaaaatcctgttctacggcactaccctggccggagccgcccctcttatgggcctgccgagactgtgctttgcggaccggtatcaggagccgcagtaatccctggcaaaatcccagaagcatcctgccgccgcaggcatcagctgattcctgcggcgcaccagcaaaagtctggacacatgctccggctctgtcaggcgcctgcataccagcctctgcctgtctgtaaagtaccgtactgcctccgggcagatcgccaccgccacattgcgctccaccaaaggcacgatacaggagagggtattataggtacacaaaatagtatgctcccgctcaatccggtgaaaccacccccgtatctcctcctgcagaggcggtctggagggaataataaggggactgccggctatgtcggacagcagtatggtgtctcccggctgttctgccatgggatgttccctgctgagaagggctgtccaggattcggtttttatcagggcgctttcgtatttctcagtcctgaaaggctccctcacaattcctaagtccaccagtcccttgtccagtttatcattgatttcatccccgttcccgcaccagatattataccggattccgggaaaatcgctgtgaaatctctccattatatccgacagcacccctgccccgcaggattccgttaccccgatggaaataagtccgcctgccccggtccccattctggagagctgtccccttgtcttttccatcagagacagaatctcttctgcctgctgccttaagaatatcccttcctccgtaagacggatatgcctctttcccctgataaacagggttgtccctaattcttcctccagctccttcatctgcctgctcagcggcggctgggccatgcacagctttgccgctgcccctgttatcgtgcctgcctgggccacagcaaggaaatactgtaaatccttcagatccatcatcttttaccatacctttttgatattatactacatatattatatgtattttaatatggtaaatcaatttgatacaataaaaaggctgagcaaacaggaggatttcattgtgaaagaaaaggaacgaacagaagcatacattcattatatcatgtcactgtcaggaggtttcatgggcgcctacgcccttcttaaccggtgcgagattttcggatccgcccaaaccgccaatatgatccactctattctggacctgtcatcaggcagttggaccagcctgcttctgaggctgggttctcttcttatctttatcacagccatcattgccgccactctcattccccgtctcatatccatagacatccggcttatatgtattctggctgagattcccgtgattgctgtcctgggcttttttccggcgaacatggacccgctcatggctctctatcccgtatttttcatcatggcctttcaatggtgttcctttaccggcgtaaagggctatgccagctccaccatattttccaccaataacctgagacagtttatttcttccctgtcaaattattttgcggacaggaacaaaaagcatctggaaaaggcatgggtctacggctttaccctgtttttctaccacataggtgtggccctgtgctggtattttactaaaatctttggaattttctcggtatggctcaatttccttcctcttttgctggccctggtgcttgtggaacgggaacacattttcataaatttacgctccttcttgcaaaatacatctgcctgatgctatagtatagaaaggttttatcaggacgattatcaattgaaggaggattaccatggcatcactgccaaggattggcgaaaccataagcggttttaccgtcaccgaacttggaaccatacacatgctgggcgccaggaccgttctgtttaatcatgaatcaagcggcgcccagcttttatatatccagaacgatgaccgggaactgggttttaacctgatttaccggacgccgcagctggatgaacgggataattcccatatactggaacatctcattctgtcctcctgccaaaagtatcccagcagggatattttctttgacatggacagcaaaagttatactacctttatgaacggtcttacggacaataccttcacctgctacccggtgtgcagccagagccaggaacagctggtaaaactgatggatgtattcctgtgctgcatggaggaaccggatgccctgaaggacaaacatttttatctgagggaagccatacggtatgagctctcatcccccaggggcccccttaccatgcagggcacggtgctcagcgaggactggggccatctgaccgacatcctggaaaatgcagacagcgccatgtcccataccctttaccaggacacgcgcaccgccaacctgctggggcgggcccacctgcattacagggaactgtcctatgagcaggtcagggaaacctttgagcggtgctacagctactccaactgtctgattaccctatatggaaatatggattacaggtccgtactgcattttctggacagagagcatctctccagagcggcgtcaaaaggccgcagcctcctcggtgagtttgaagaaccggtaaaaccaggttttcgcacctgcacagcacagagtcccgcttaccagggcagtccctcggaacacgcctctgtcatggactacggtattgacctgtcggactgtacaaaagaggaactcatatactgggacttgtttgcggatatcctggataacgatacctctccctggcacaggtatgccagggaaatgggaatcaaccatgtgatggaggtctatctggatactctgctgccccatccctccctaaaattccgcctgcgcaacggggattcctgtctgaaggaggcctttttaggctctatcaaaaaggccctggaggatataagccgcaatgggctgtccccaaagctgtaccgggcttccatgaaggaaaaccgcctctccgactcccttacccgggaagctccccatctgggctttaacctgtctgaggaaatcgggcgttactggagcattacaggccggaccgactattttcagctctatgaggaagccttccggcgctttgaggaagattccggccagtccatcataaagaagctggctgcctctgcccttcaaccggcagccagcgcccttgtcgtaaccgaaccagttccgggtctggctgagcagatggaggaggaaaaggagcaataccttaaggaaaaactggcttccatgactgcggctgagcaaaaacagctgatagaacaaacagctgccttccatgactggaattccagggagcggagcaatatggactttctcatagggcccggggagcttcctgagccgtctgaatcatgtccgtttaccaagagacagtggggaaccatcacatgctacacatctcccgccccctcacgggacgtgggcagctaccagctctactttgacattagcggcatagaaaaggacgaccttaattacctcaccctctatcagatgcttctcacagaactggacacaaagcggtttacggtggaacagcagaagaacctggagcaggaataccttcatgactgtacctttgacgagctgtaccccccaaaggaggcaggggctctgaaccatcccatgatgagtgtattctggtacggactgaccggggactttgaggtgggactggattttcttctggatgtaatgggcggcggggactacagcgacacggataccatcatacaggtcctggaaaagtatctgcctgactacgaccagtccaaggcggacaatgcctctgccctggccttcagcctgtccgaaggctatatgaggcaggaatgcaggttccgcaatatgttaaacagccaggaaaattactattttctgaaggatgtcctgaatcggttaaaggaagatcctgatttcggggctgcggcagctgccagacttgaaaccatttcccataccatattaaaccgccggggtctggtattcctggcagccgcctcaccggatgtattaggtactctggaacagactgccgtggatatacttgggagacttcccggttttaaggaagggcacagctctcctgctccggccgtctggctcccggaccagagacaaaaactggccgtgtgcgtggaagcctcctgccaggagacacggctcatgggagatttccatggaaatcccggctttaaggggcgttatcttccctttctcatggcggcggcagataaatacttgaaacctgccatccgctaccagggcggcgcctatgacagcggtattgatttttatattcctgcgggctatttctccctctggagtaccgctgacccggaagtcaggagtacgataaagctgttcctggcaaccggcgcacagctcatggaactgccgctgacccatgaagaactggacggctacatcctgaacgcctatgcccaggcccttccgccctccggaaccttaagcacccgtatgcggcacatgcgcagggacatggtgaacatggatacccgcaaaataaacgaaatgatttcagacatcaggaacgcggccctctgccaccagaaagaagccgccctggtcattgataggatattggggcgcagcgccattgtcacagtgggaaatgagaagtgtatcatgagggataaggatgtgtttgaccaggttttgatttatcatacagattatgtgtaaatggccgggacgggataagcggccatgaaaacgtgtctttcattgtgtttttctcttttgcagacaaaaacgggctaatgcactaaagcgttagccctttcttgctttcggttatctcatttcatgtttccaatacttttaaattcgcctaatccgctttctatgacttcaccagaaatcctccgtctacagggataactgcgccgtttaaatagtcgctggcagaggaagccaaaaacagtatgggaccctttaagtcctcgggtctgccccaccggcctgcggcaatccgctttgtacattcgtccttgcgctcctggctcatattagcacacatctccgtatccatatagcctggggcgatcacattgcagcaaatgctgtgatccgcgcagtcggaggcaatactcttggaaagctgagtcacagctccttttgccgcagaatatgccggcacggtagttccgccaaagaaggaattcatcgaaccgatgttgatgatcttgcctacggtgtccttgtcccgcatgacctgaatggcccgctggcacataaaccacacatgatttaagtccacattaatcaccaggttccacatctcctccggaaactcccatggctcataacgtctctggatgcctgcggccggaatcataacatccagcttacctcccagcagttccatagcctcatcgaacatccggtccagttctgcttttttggacaggtcgccggctacgccgtgggccttatatcctttcttacagtattcttccaccgcctgttccagcttctccttctggagatccatcaaaaccacctcggctccgttttccaaaagcccttctgccatacctctggacaggccctgtgccccgccggtgacaatgcacttctttccctggacactgaatttttccttatagtcgtataccattttctttacactcctcatcaattataatctatattctcacggcgtctggaggcttccgtcccggtttctggtttgggtccacctggtcaccgtgttctcgcaagggtacttagctgcctcccgttcattgatgtccacccccagaccaggcctttcgttaggatacacgtagccgtccctaaattccggaagcccgggaaacacctccaaaagcgcacctttcggaccctttaaatcctggatcacaaagttgggcggctcaatgccagaccactcctgaaccccgaaattcctagccgccagatcgatatggacattggccgcatgtgcgataggggacatatctccaggaccatgccaggcagtccggactccgtactgctccgcaaacatctggagcttgcgcgcaggcgtgatgcctccgatctggcttatatgcacccggatgtaatcgatcaaatgcccgctaatcaaatcccgccagtcaacagagcggttgaacagctccccttgtgcaatgggtaccccactatggcaccggatttcccgcagccacttggtttgctccgcacacaccggatcctctaaaaacagcaggtcaaagggttccagctccctggccagtttcactgcttccggcggtgccacccgctcatggacatcgtgaatcagcttgacgtcatacccgattttgtcccggattcccgcaaacagctttaccgtgtcccgcacatagcgggccccatccaggtaaactcctggcagagcaccttggggggcggcttcaggaatcacaccgtaacgttctcctccgtatcccctgcactggcagcggatattctggatacccagttcccggtacctctcaatattttcgcacagctcctccaaatcccttccatccgcgtggcggtagacaggcactccctcgcgcaccctgccgccaaacagctgatacagaggcataccagccaattttcccttaatatcccaaagggccatatcaattcccgagatcgcgttgttttcaatgggacctccccgccagtatccattctgatacatcagctgccatagttcctctatatcttccgcatttcttccctttaaaagcggcgtcagatactcttccaccaccagcttcaccgccagatgccgataggaaaaggttccgcagcccaggccgtaaaggcccggcacattggtgtccacccgcacggccagaaggttaatcccctctggtgccgtacagataactctgatattctcaattgtcactgccactgtgctttctccttatgcctgataagtctctaacgccgtgatagcctcccggatcatctcctttgttaccggatacggcgtatgctttaactcctgattctccatcgtcaccttcaacacatcctccagcggatcggtgggatccagctccagatctcccaagcagacaggcagcttaatagctttgctaagccgccaggccctgctaagcttttcccagtcatggtctgccatgaggttgaccagcattccataggcgaccacctctccatggagatgccgctcctcgatacacttacggctggtcatgccataaaacagggcgtgggcgataccgccgttgtaatccggatgggcagatacagaaacaatacccggggatataatgatatttaaaatcgtctcctccagctcccggctgatcactccttttgcggcatcctccatggccttctccgccttctccagcataggataaaagcacatactgcctgctgtaattcccagagcactgccataatccagggcttccccagccttggcagaccaggcggactccacgtgctttgccatagcgtctccgatgcctgcccagaggtaacgcaccggcgccgccagggtcagcttggggttgataaagcagtgtacaggaacatttttcagcttgagaatctcccggaaggatccgtcctcatggtaaaggatgctgatctgcgtgataggcgcacagttggaggcaatggagggtattgtgtagaccggcttactcagcctgtcacccaccacttttaccgtgtcaatacacttgcctcctcccacagccaggattacatccgcctcctggactgctggttccctctccagccgcttcacattttcccaagttgcgtcctttccgtaaaccaccgcccctgtcacaataatctctgcctgctccaaggacgggagcacataatcttttgaagcctcccatgcctgtttgccgcatataacggccgccttcctccccctgcctatacgctccggaaaagtcccaaaggcatcctcgcccatcgtaaactgggggagataaatggaatgatattgattcatggtcttttcacctttcttgtttcagttcatctgttcccgcctgggatccaataccgccagatcgtaaccgcggctctcatgtgagtgggctgccagtacccaaaaataagcattccgtgtccccggggaagccaccgtaggatgatagcccctgggtgccagcaccatgcttccgctcttcaccggatgtgcaacgatattatctacatcccccggggcggtgtagcttaggtgcagcccaaaatgaggctcatccatgtcaaaatagcagtaaatctcctctaagtctgcctcatgctggtggggcggccaactggtccaggcaccgttgcctccccaggtcagcccggcaatcaggcgggaagcctgaatctcctggttgagcgtcataaaaacctctctctgccccacgccctttccgtgaatctgatgaatctcacccaaaggcagatgcagattaaaagcacggaaaaacggtgttccatagccctcatccacggaggccccgatgtaaaaaacacagtctgcctctgcctcgatggccacactgtttcctcccgccgtgtagaaggagtcaagccggccgcagtgatattgatggccagccagctccagtccagccgctcccttaatgcatacaccgttcatctcctcgccgccaggcttcagttcataacgctggcctgccgccaggttcagccggtacattaccgccacttgacagtcctccctgccaggtacgatcactttatgaaatccatattcctcaggggaaacgattttccacttttccatccgttcccttgtcacaactccctgtaccataatcaaacctccttaggtgagaaacgtacaaaaccattctgaaaagacacacagaaaaaatactcctacatagccaaccaaaaatggaatctccgcctttgcgatctctcccatcttcagctttgacactgtggccgccgagtagatgttcaccgctaccggaggcgtcatagttcccactacattggaaatacacacaatcattccaaaatgcactacattgatgcccatgctctgagcgataggccacaataccggaactaacaaaacagctatggctgtcccctccataaaggttccgaaaatcagaagaatcactgctaccaccaggcagaacattgttgcatttaaattcatgccaatcaccgtatccaccagggccttggaagcgccagagattgtgaacacccacgagaaggctgtggacgcagcgatgatgaacaggatcatagcagaactcttggcagagtccttgatgatttggattgtatccggcagattcagctcacggtagataaaagctccggcaatagctgcccatacaacagccaccgcagcgctttccgtggcagtcaacataccggaatagattcctcccagaataataatgggtgtaagcagcgctggaatggcgtccagaaaaaccttcaccacctcggcgggcgtgcgcttcacattctgtttcggccacttttccttatgggcaaaccacagtacctccaccatcagtaccagcataatcacaataccaatcatcatcccctgcttgaacatatttccaacagaggcacctgtcagcgtacagtaaatcaccattataatagatggcgggatgatgggcccaagcccaccggacactaccagaagtcctgcggtccgcggccctggataaccctttttgatcatatccccgtagagcatggttccgatggcaatgaccgttgcaggggctgatccagataaggcagcaaagaatgcacaggccagtaccagcgccaggctcataccgcctctcacgttgcccaccaggcagtccgcaaaatctacaatccgcctggaaatccccccccttcgtcataagattgccagccagtacaaaaaatgcaatggccatgatagagctggactgcagcccgccaaagatcctttgggcgatagccgtggaggaggccggaaggcccccgaacaccacggccgccagtgaggccacactcaaggagatggacaccggtaccccgattaccaggcaaagaataaaaatcaaaaataaaatcaatcctgcattcatgtcctgtttccctctttctttccgaattctgcaatctgctgtaccagcgtaatggtctgaatgacgaagataagtccgaaggccagtaccagcgagaaatacatcagagacatgggaagcttcatcacaggcgtagtttggccggcttgaagctgctttaagaccagggcccctcccgctttaatcatgataaaagcaaatcccaccagaatcacctgccggataagatccacaatcttgcgggccacaccgtgtagtttgtccaccacggcagtcaccgctacctgggtgccatctcttagacccacctctgttcccagcagcgccatataggtcatactgtatatggctatctcttctgtccagggcatggaggcctggataaaattccgattcagcacagaaatgaaataggaagcgaccatggccacaaaagcagcgaccatgactgcatactctgccgatgtaacgcatgacagaagctttttcataaatttcatacgaatcctctcctctgtttctactgtaccgcactcttggctgcgtccacagctgctgcccatttctcgtcgtaggaagcaccattcttttcctgggccgcctgatactctgcctttaatgcctcggtatcaatatcatagaaggtcacacctgcaccctctaaattttccactgcctctgcattagcctcattcaggtaggtccactgggccttgcacccctcctgcaccgcattgacaaagggctctctcatatcttcaggaatcttgttccaggcattgtcgctcatacagatcggaatgtagacaaagcagtgctttgtattcgtgattgaattcactcctgcctcataatacttattaatccagcagttagatactgcattctcacaggcatcaatggttccctgctgaagcgctgtgaactgctcggaggcagagatggccaccggattagccccaaaggcagtaaatgccgccagctggccctcgttctgcatcacccggatttttacacccttaaaatctgccggggtctgaattggtttcttagagaacacatcccgaaatcctgactctaaatagccaatgacgtgaaggccatgcttttccgcctcggcagaaatcagatctcccagctcattctgcaccgcgtaattagcctggtctgcgctgtcccagagaaaggcctggtctaaaatagacatttctggaatatagttggccaaaaccgaattagcgcaggtagcgatgtccagatcgccctggatcgccatatccagggtatctgcctctccacccagaacgccgcctgcctggatggtaagctggatttttccttccgtggcctcattcaccagctcggcaatcttttctgctcccttgtaataattcgactgggaattatccaccaatgccattgtgaaattcagagattcttcattggcagcagcttccgtcccgctgttccccgaaacgcttccctttgcctctgtttgtccgctgccggacgagccgcaggccataagcccaagagctgtcagtaccgcaattcctgataataaatacgttcttttcaacacactgatttccctccgttttctaaattgttctgtaaacaaaaaaaatatatccgacgaatgcagtgtagcacatcggatatattttgtcgatatgttggattttgtttctatatttgcagatatttattgtgtatattgtacaatatttttaaaagtcattcgatgactttcccgccttctgctgttcaatctcctcaataatctttcttcgggtactgtttaagtgatcgatcatactgtaacgggctccactggcatctccccgttcgatagactccgaaatcatatgatggaatttcaccgtctgatttgccagctcgtcatttgtgaccttgcagaacagagggattcccttgactacaatctccatcagcttgcaggcaatctcattcttagaacacctggcaatctgaagatggaactctatatccttctcataatgggattcctgcatctggatctgccagcgcacctctgcctccagctccatcagtttccggcagtcctcataagtcgcattggtagctgccagggcagcgatatccggttccagcatcagccttacttctgaaaactccagcgctttatttggcagctcttccggcaaaaatgctcccaaaaggtttggcgtctctcccccgctgatctcaatgggcttttgcttctgcctcaaaagataggtgccgctgccctgaacaacctccaccaacccttcaaaccgcagcagttttaccgcgtcccggacagtccctctgccaacctcgcagtattcggccatctgcagctcatttggaagcctatcgcccgccttcatttcattctcaataatatactgccgtatcttcacggccacccgctccgagagcgtctctgtcttttgtctcacccagccaccgcctttttccatcatgttttctgtcagtatacaataccgccggggttctgcaggtgcaggcacattcaatcatccaatcccgccatacacaattcccagtatgaacactatcacggccagcggcacatagacatacctggctaaaggtccgaagaactctcccaaaggctttttcctgccttcctccagttcctcccgtatctccttatatcccagaatataataaatggatacagcccccagcactgcgccgaagggcaccacaataatggtgatgaaatccatccacgaacccaccttaggctctgactccagaaaaatacccactaacagggcaatgccgctgcacagggccacggccgctttcctgggaagcttaaaccggttctgccatgactcgcttacggcctcaaacatattaattaagctggtgatgcccgcaaaagccacggacaggaagaatatcactgcgaacagccttcccataggcatctgccggaaaatctcaggcagggtgataaacataaggggcgggcctgcgtttggctcaatgccgaatgcaaatacagcaggcatgatggcaagggcagccatcatggcagccaccgtatcaaaaaaggcagtgcggatggatgccttgggtatatcctctgtcttggccagataggtgccgtacacaatcattcccgagcccgtgatggacagtgagaaaaacgcctgtcccattgccatgacccaggtatccacctttaataaatcactccagtccggggcaaagaggaatttatatccttctgccgcccccggcaggaaggccacacggatggccagtattgcaaacaatacaaaaaaggaaggcatcaggaccttattaatcttctcaatacccttggtggccccaaacataaggatgccggccgcagtcaccaccaccaggacatgccagggaacacttccgaactcacctgtggcctggctgaaataggccgctgcatccgctgtaaggatagcccctgttacggatcctgccagggctcttaccacccagcccacgataatggcatacccaatggcgatacctaaagaacccagaagaggtatccagcccaggaaataccccagcctgcctttttctatttttttccagcaatattcataggcgcccagggttccggtcctggcccggcgtccaatggcaaactcagccgacagccctaccaggccgaataatacaatgaatagaatatagggcaccagaaacgcgccgccgccgtattgccctacgcggtacggaaacatccagatattgcccattcccactgcggaacccacacaggccagcacaaatcccaggctgcttccaaagccgccgttctggtgcacggctgccggtgaggaatccgtttttttctgcttgttcataacttctcctttatgacatacatttagacggcctgcggtcctgcatgaaaatgaaacaggactgcctgtaacgccatctttaatatactaccccatttacaccatttagtcaaagttttaaagcaaaaaagcggcaattagaaaaatccgaaaagcaatccccaaagaaccggcatctgttataacatatcgaccacatcatagctgcttccgttccacactgccggacgcacctgcctggtcttaagctgttccacaaaatccttcagacagtctaccttctccggcagccatgtggcatactttccaatctggcccttggtgtgggcatcactggcccctatggtcttaagtcctaattcccggcagtaagaaaatgccctgcggttggcctccagggccgtactgccgtttaacacctccaccccgtggagccctttgaccgcgcggagattttcctccagaccgcggttattgttccggaaagggtggcaggagacacagaaaccgccggcctcattaacatggtttataaaatcctgggcatccacccggcagccgggataatcttcaatcccccacgccgtgatatccccctgaagggaaaagaactcaatacccacaaaaatgggaaaaccggtcctgtctgaatactctgccgcatattccctgagtcccatgctgtcatggtccgtgatgcagacagcgtccagccccctgccccgcgctgtggtcacaatttcctccagacttattttgctgtccgatgaataagtacactcatgaagatgcatgtcaaccagcatttaggttcctcctatctcttgataattttaagcagcctgccgtcctctgtccataccaggctctccagatccatgaattcagccacaaacgggctggccggcttccggcaaaggtccaggggcgcgtcattctggaccagctcgccctggtccatgatagcgatacggtcagccaggataatggcctcctcctggtcgtgggtgacgaacaccatggtcagccccaggtctttctggagccgtttcaattcatagcgcatcctggtgcgcagggcagcgtccaggttgcagaagggttcatccagaaggcacagcttaggctccacaatcagcgccctggcaagggccaccctctgctgctgtcctccgctgatttcctggatataggccgatgcataatctgcaagccccaccatctcaagataacgcatccccttctgccgggcctgttcccgcttcactccccggaatttcaggccgtaaaccacattctggagcactgtcatgtggggaaacaggccgtaggactggaagacggttgtcacaggcctctgttccggagggatacgggtgatgtcctggccatccagccgcacgctgccgctgtccggctccaggaagcctcctatcatattgagggtcgttgtcttcccgcaccctgacgccccaaggatgcacagaagctggccctgttccagggtaagggataaatcccgcaccacttccctgccgtcaaagtgttttttcaaatggtcaagttcaagatacacgtcgcttacctgccttccatgttattaaataagccatgccttccactgccagcaccaccaggatgatgctggtggctatcagggaggccaaggcgtagtctccggtataaaccgcatcaaaaagcttgaacactgccagcttgcggcccggatctatgaggaacagtatggctccggccgtagtcatgctgctggaaaagttatacacaaaacagctgagaaaggccggtctgagaccgggcagtattacggtcttcagcaccgacatctgccccccgcccaggtcccgcactgctttttcctgtgctctgggcacctgggtcagggtggccgaacatatctttgtggccgtgggaagctgcttgaaaagcatgttggaaataacaatcagggcagtgcctgtcagctttaagggcggagaattaaaggccaggatatagccgattccaaagcaggttcccggcagcatatagggcagcgtgaccagacagtcaaagaaattccggcccggaatctgtctccgctccatgtaataggcgaacagcatggcaaagagggttccggccagggatacaatgagcgcatatgccacgctgcgccccatggtgtccaggtcaaaacggaccatctgttccagataccgggtggtaaaggaatacacacctctggtgcttttgaggaaaccggatatgaatatacatccgtactgcagagccatcataaaaaagaacagtatgcttcccaggtttgccagaatcccggccgccccgcattttcccagtgaaagggccaggggctcctgtctccccctgcttccctctgtcagcatatccgaacgtttcatcagtttccggtagaggaaaaacgcagctatggagggaagcatcagaaccatattcatggcggaggccttctccagattagagtatcccaccagctggagatatatctctgacgcaatagtgctgaaccttccgccaatgatgaccggagtcccaaaatccgccagggaacggacaaaggaaaggagcagggccacccagatccccggccgtataagaggcagtacaatgtcccccaaaatggccttggggctggctcccagatccctggctgcccgtatgctgtctccatccagtttggtcaggattccccccaggaacaaggcatttaaaggcacaaaggaaaggctctgcatcaggataactccccagcagttatagggatcccagctcagccccagcagccggtacgtaatccatccccggcgtccatagagctgtatataggccagggaggatacaaagggaggggagaccatggtaatcagcagaagcgccatgcagagcatcctgacagctccccgtcttgtggcaaggaacagggctgacgccgtggaaaaggcagtgcacagcagggatgcgcagacacccacgaacacactgttccagagatttcccctgtactggttccagacagcagcatatgcgtcatagcttatgccctttccgtcccacagactccgtatcaggatgcagagcatgggccagaacacaaacaggaaaacgctggccagcagaactgccagcagcactttatccgccccatatcctgcaatgccaaaaaggacatctttcgatgcccttttgccatacatgtctccatgcatgtttccgtgtttatttgtattcatatctctatggatgctgtcaaacctattcatctgctgccttatctcccatcagcgcctcaaaatgctccaggatttccgtacgcttttcaccgaacagggacaggtcctccttcatcagcatgccggtgtcatatcccaggtccagtccttccagggacggcttgatggtctttacgctgttcttctggtcaatctctgccagcatctggagattctcgtcactgctgaacagccactctataaagtacttggccgcgtctgtattctctgcattcttaaatgccgccactccctcgggaacccatggaataccatccgccgggtaaacgatggacacatcatactcgtctaacagggactcgatggtgccgtcgatgtatgtgattccgatggcattttcatcggtggtcaccttattcttaggatcggatccgcgttttgcatagtaagctatattcttattcagaccttcaaaataggaccagccatcctcttcgcccttagcctgaagcagggcattgaccacagcatagttggttcctgatacagccgggttggacatgatgatttcgccttcatattctgcctttaacaaatcatcccagctggcaggtgcctctatattaagctcctccatgaggccgtcgttgagcagaaagcctacgatggtgattcccttggaataccagtagccctccgggtccttaaagtcctctgccaggtccccagaagcgtcaaaggtaacctgttctaacagtccgtcatccttcgcgctcatgaatgcgtcaatgccgcctccaaaccataaatcggcagatggtgtgccgccctccgcacggagcttggagagcacctctcctgaggacatggacagcagctcaaccttaacaccggtatcctctgtgaatttgtcaaacaatgttacataattctcgctggtggccactaccttcatggtgccggacagagccggtgcttctgccttagattctgcattggtttctgccttagtctccccctggctccggacttcagtttcctgggctgcggtggtttccccggtctgggattcggcaggagcccctgcagtattattgcctgttccattgctgctgccgcaggctgccagggccggtaccatggtaagcgccattaacagggcaactattttctttctcatctgtggtcgtatcctttcttaatcgtattttatatcactatcctgtcctcctctgaaggacagcaataaccattgttgaattataatgagcaccggcccttaagtcaatatacagactgtctgtatagaaaaaaacaaacaggcagaaaatcagatagaaaaaatctattcgctgccgaggccggctggactgtattaatttgtaaaaaggaatagacggtgccagggcattgtgatagaataaacaaggttattttcccggcatatggccgggatttttgatgaatatgtgtaaatatatgccagatatatgatggatataatggaggggttttgaaaatggaacataaaagaagccaatgggccagcaacataggttttatactggccgctgcgggaagtgctgtgggactgggaaatatatggaaatttccgggaaaggtggctgccggaggcggcgggacgtttttaatctgctatgcgctgattgtcctgttcgtaggattcccggtcatgctggcagagctttccatcgggcgcagcacccagaaaaatgtggtgggcgccttccgccggctgaacccgcgctggagctttgccgggggcatcggggtcctgaccttgtttgtaatcatgtcctactacagtgtagtgggaggatgggtgatgaaatacatttcggtgtaccttaccggggcggatttcagtgcctttggaaacgacagcagcagattttccgcttattttgcagattttatatcacggcctgcagaaccgcttctctggggcgccgccttcctccttctgtgtatctacgtggttgtgcggggcgtatcagaaggaattgaacgggtcagtaaatttttaatgcccggcctgttcgtgctcttaaccggaattgtggtctatgccataaccctggacggagccgccgaaggccttaaatatatactggcagtggaccccgcgaaattcaacggaggaaccgtggtagccgccctgggccaggcctttttctccctcagtgtgggaatgggcatcatggtgacctacggctcctacgtgccaaggacagagaatctggccaaaagcgccggctgtatctgtatcttggacagccttgtggccctcctgtccggacttgccatcgtgcctgtggtttatattacggctggtcccgaagccatgggcatgggaggcgggtttgctttcatggctcttcctgaggtgttcagccggctgcctggcggcgtgttctttggttttgccttcttcctcctgctgttcgtggcagccctgaccagcgccatcagcatccttgagagctgcatcgcatggcttacggaagaattcggttttgccaggttaaaagcaaccctgctccttgtgattcccatgtcattcttaagcgcaggttattcgctgtcccagggagccatggacataaagctgccgtggtttgattttaccaacggcgtccaatatctccccatgaacgctgtcatggaaaaattcactgacaatctgatgattcccctgggagccctgtgcttctgtctgttcgtgggatgggtttggggaacagacaacgcctcaaaggaaattgaagcctcaggccacagcatggcctggaaacgcctgtgggcctttctggtaaagttcctggctccggcggttattattgtcatattatattttacagttggccgcggacagggtctgtcctgataaatccattctgtaaatcatgaaactaaggttccggtatccgtctttccggaacctgtattttttgcattcccgctttcctctgtccaaattcctgtgctgttttctgcccggatttccgtcttgttttcttcactgctcttttctgccttatcttcccttaccggatcatccgcttcccggttctcctccagcgcatccatgctgtctccaaggctctttgcctgactgtccccaagggtcgaagcccggtctcccagcgccgcaatttccatctccttccgctttaatgcgctcgtctcattgtcaaccatgtccgccacattggcagcgccgcccatgcctttgctgaccagggcatccacatgcacaccgccctggctgacctcagcttccttcacatgcatctcaccctcaacccggtcctttacggcggatatcttctcagcattcctgataccgtccgatacattggccagactgcttaaacgctccacctcgcgctgttcctccgtcttatgagggtcagtcctgtccgtctttttcttgtcatccggttccgcacatgccttggcctgctgggcatacagtcctgctatctgtttatccaggtcggccagctgctttccgtagtttttaagctggtccttgatgtcatccaccttaccgccgttttttaaggtgttctccaccagttcattctttctgtcaatgatggtctgcttctgctttgtcagattctctatcatgctcatcagctttccctggggcgagaaatcggcccggtcactgcgcccggttccggcagattttccggttctgctattattctttgcaaaggaggcgtttacccttgccgcattgataatggtgtttttaggctggattgcgttaaaatttatcctcattgtttacctcccactggtgttatagggtttttggggtttcttatttctatttatgttatcgtacggctgcggttaaagtttatagtcagaagttaatatcttccgccactcatcagatcatgaaatactgataacattcgttggaatccattaccgctttccatgtatcataaacttttcataaatgcagcatatcctaaacatttatgacttttatatatttggaaagattaccggattttaagttgcatgcaaaaagggaatccgtcaaccagcactgtgctgacgaactcccttctactactgcttagcatcctataccctgtccatgctcaccttcacaaccactttcctcacctttccagggtgttccaccatacatcccggacggtggatatcatttggaaaaaaaatgttatagcagcctttggttgctatgagaaagctctcgtctcccacatcgtcatagaagtaaatatctccttcttccttcccatctgtaatggtcaaatctcctatatccggagcaaatcccaacatttctcttccctttgcaacaaactgtacatctgcatacttcttatgtatttctggtcttttatctgcggaagcacaggttgttatatccattaccattgcatatatatcctttccgtcaatggcatatgtgcctggttccatctgtgtaaaatccctgctcataagatattccagggctttctggattccctccggatattttcccaggtcctcattggtataaatagatgaagatatcatatagtcaccctccctataccgtctcaaaatgcttttttaacggaatatagacatccttcctcaggccggctaagagcatcttgaaattcgttacatcgtttctcagcgtcattaccctgactccattttccgccatctcaattgcccgctccagattgggaggcgcgatgggacccatcagcggaatgcctttttctttggcctttttaaacaaacgttcaaaccgactcttcacctgtgggttgtcaaagttatatgtctctttaatacccaagccaagcgccagatccgatggccctagctgcactccccccagtccctccacatccagtatctcatccatattatcaaagaattcagggtcctctgccagtggtattatcaatgtctcccggttgcatttttcaacatactctccaaaattaaagtcaggatagcaaccatagcctgcgcttctgcaatccgtggctgagcctctcacaccataaggagggaacctgacagcctgtaccatttttctggcatcttcagctgtacggcaatgcggaaccactactgcgtctgccccgaactcagcagttgtgcgaatcagtacctcgtcattatacttgacacggacgcatgtccccattccgctctcattggcagcaatgatcaatgcctgcagttccctgtcaatggtcacaggtgtatgctccatatcaataaagacaaaatcaaatcctgagtatcctatcatctggaccacgatagggcttcctgtgaatatccccattcccactgccagcttaccttcatccaatatttgtttcatcttattttctctcataatgtttctcctttttatttttacttaaattcgatttaaccgtttttaatagttcagaaatatcttaggaagaaccaaaacaacatccggtatgtatgtaatgacaagcagaaaagctatcatgactgcaatcataggaagtatctcctttatgatatcctttaatggcgtttcagaaatggctgatgttacaaacaacagaggaccataaggaggcgtcaccattcctatcatcatattaattacgaacatgaccccgaagtggaccggatcgataccaaatccctgaaccagcgggtatatcatgggaataaataccagtgtaatggtgttattgtcgaatatcatacccagtattaggaacataatattgcatatcagcaggaatacatatctgttatctgtgattcccataataaaaccgcctaacagtgtaggtatgcgctccagtgtggatatataaacaatcacggacgcacagcccacggttatggaaaccgtgcctacagtcctcgctgtttccagcagtattttttttaaagactcccagtttaacatcctgtacaccagtacagacactatcagcgcataagcccctgccaccgcacctgcctcagtgggtgtcaccgcgcctccatagattcctcctaaaaggatgaccggcgtcagcagtgcgggtattgccttaaatgtgtatgtcaaaaaaagaggtattgtatatttagtaccataaggatactttctcctataggataccaccagacagtacgctcccaaaaataacgcaagcataacccccggcagcatacctcccataaacagtgctcctacggaagcgcctgtaagggacgagtacagcagcatggtcatactgggaggaaagatgggtccaattgtagcggatgctgctgttatggcacagctgaaaccatcgtcgtacccctggcgcttcatctctgctatttccatgataccaacgccggaagcatccgccatggctgagcctgtcattcctgaaaagataagagataccagaacattaacctgagccatgccgccccgcatccttcccacgataccatctgaaaagcggaaaatcatatcagatatcttacctgtattcattacatttgccgtaaatacaaacaacggaatggctatgatgacataattattccaatatgcctcacatatgcagttaggtatcacccccatattccctcctgtagccagcatatatatgacgcctacagaaagcatacctaacgcaatgggcatacctgtaaggaatatcatggcaaaagccgctaaaaacacaacaattcctatattcatactatctttccccctctctaccctgattgcccccgcttctgccggaaccaccctcttatatccctgtacacatccgcgaaggaataacacatcacaccaaaaacaaggattatgattggaaagaagtaaaatttaaccggaatttttaaggatggactaacggttctgtattttacaatatattgaactgtgggcttcatcaaaattccatatgtgacgcccatgagcaaattgcgaaaaatccttaaccacctctgaccgtcttgcggcagtaaatcatatatcatagtgaaatttacatgtttattcagcctgcgcacataacatgctcctaacagaacagtccatatgtaagtcgctacctgtacctccgtcccccacgccgggggacggttcagtatatacctggagaaaacagaatacacaaatgccaggaaaagagctgaaaatgtaataaccggaataaaaacttccacaaaatcccttattcttagaaataaccatttaatcttcgctctcattgcatgcctcctctcatcctggcggcctatttgattatctcgttaaaaatatccatgttccagtttttctcgttgtccgaattggaaagatagtatttgaatgcgtactccttaaatgcatccttatctggttcctgcagattaatcccatacttttctacacattcatccaatattttcgcttcctcagccatcacatcctggttattctgttcaacagcctcccttataacctgcgtcaacagttcctgctgctctggagtcatattctcccatttatcaccattaacacacaccagattggctgttatcatatggtctgtcatgacaatgctctttgacacctcctgcatagcatttgcatacgaagacagaatgatattctcctgggcatccacagtacctgtctgcatggcaagatatgtctcgctgctgtcaaggggcgtgggctccgcgccgattgccgtccccatgtcaaggaatgacgctgagtttggcatacggatttttactccttttaaatcctcaggggtctgtactgtaagtgagccgtctgaaagccatacatcacgtcttcccaggtaaaacggggcgattactttaacgtgaaattcatcccaaatctgatcctgcacccattttccaacctccccctgcgtgtccaatacctgcatcatatcgtccacgtcatcatataggaacgcaatatcaaacatatttgcccacagcgctccattgtcatagaaatatcccagctggatgaatcctatatcaatatttccatccaggagagcccccaactctgcactggacttaaaaagggtggcgctgtcataatgttcaaactgaaagtttcccccgcccttttgttctgatacctcggatatcctggactgcagaagctgggtcgatgctccgggcagctgggaagtggatgtaatcagcttgaccgcatctttgccagccgtatccccggcagaagtgtctgttgtctgtgtcccggatgtctggttttcgtccacctgggctgcagatgtctggctccccgctgccgactcctttttcccggaactgcatgccgccagagagactgttatgagtgctgctattgccagaacagataacctatttttatttatcatatagtaacccttcccctcttaattttttaagaattagcttttattatctcaatatgttctcttgcccgtttctcgatctctttataatctttcttctcaatcaggtcattggtcagaaaggcccttgtcccaaatgcctttatccctgccttaaggaattgcggaatcgtatcaagacttacattgcaggtagcctgcatggggatatgccccaatggtcccataaggtacttcacatggtttatatcgtctactatatacagcttcactatatctgctccgcagtccctggcgtgaacaatctctgtgggagtcatggcaccaggtatggataccatatctaattcctttgtgcgcttgataaccgcatcgtttgagtttggcgatacgatgtaaccagctcccagacggcaggccagttccacctggtccacagtcaggacagttcccgcgcccatacacacccggtcacccacagcagcctttacggccatcatctgttcctcaaaatatgcctcaggatcatccttgcagtgattgtaggtaatttcgataaacttaactcccccatcagccagggctctggccacatctgcggcatcttccgtgggaaccccccggaaaattacgattaacttttccttttcaattcctgcaagtacttcatttccacccatgtcaaattcctcctgttatattttttattgtcaaaaacgtacaataacggcatgatttattatgcactttttttattctcccctcctatacggagagggggttttcttttattttgacatattgtatatttttgatatttatagtatactttaatataagcataattactaattcttttttccggattctattatcgagaaaaacgataattttcagagaggtgttgtaaatgaatacacggcaattagaatatattcttgccatcgcggaagaaaaaaatattctccgggcttcggagaaactttttatatcccaatctacactgagccagacactgattaatttagaaaaagagctgggcacgccgctctttattcgtaatcagagagagcttgccataaccgaggcaggccagtattacattgaggcggccagagatattatgcatataaaagaacaggcatatgataggatacgcagtatctctgttacgggtaaagaacgttaccgcgtggggatatcttcccaggaaggaatggaacgttttttgactgcctccggtctttttcagaaaaaataccctggtgtggaactatatgccacagatgaaagtaccaaaaatcttctgaaaaaattaaacatggggcagcttgctttaattattacctccctggattccctgcaaaaaatcacccttccttataaagtactcaaccgtgaagaaatccttctattggttcccaggactcttccatacaaaatatggggcgaaaaccgccgtcttaagtgggagctgcttaaaaacgaacattttattctatccaagcaaaactcaaccatgcgcagtattacggaccatatattcaaacagctgggggttaaccctgatattgtatgtgaactggacaatacctcagccaccatacatatggtagctgagggtaccggtcttgcctttttgcccagtggtcttaaagttgagaatgaacagatccgttatgtatccctgacacctaaagtctatcggtatcaggtagttatctaccaggaggaaatgtcccagaaccccaagatgactgattttattgatctgctctgaattgatctgtttcgtcacttttttctaaaacacgctctcgcattttcaacaaattccgcgttattaatttaacttttattgactattttgcccatatttgttaggttagtctttatggatacacattatttcagaaaacggacataaggagaataaagcatggaaatcaccagccaactgaccgccgaggaaaagagggctatcatccgggacaacggaggggacaaggaacaccttctggctatcctctatgagctgcaaaacgcctcaggctacaactacattgatgaggaaactgctgcattggtggcagaggaagtgggaatgaatcccacacgggtatatgacatcataacattttatgccatgttaaagacagaaccaaaggccaggtacgtgctgaaggtatgcaacagcactccatgccatttctcccgttctgaggaaatcgcacagattctgaaggaggagctgggtgtgggcataggcgaaaccacagaggacggcgtctttgcctaccactatatcccctgtgtgggagcctgcgacatagggcctgtcatcaaggtaaaggacacggtatacgggaatctggaccgccggaaaatacgtcagcttctggctgacttaaggtccggtaaacgcaatcaataattgggggataacacttacatggaaatacaagaatctgttttattaagacgcgtgggcagaatggaccctgtatctgtccctgagtttgaagctctgggaggattttcaggcatacgcaaggctctgtccatggaaaaagaagaaatcctggaagaaatcagccgctccaacctaaagggcaggggcggcgccggttatcctgccgggcggaaatggaaaagcttatacaggatcgaaggggatacaaagtatattgtatgcaatgcggacgaaggagagcccggcacctttaaggaccgggtgctgctggaagaaacgcccctgagcgtcatagaaggcatgctcattgcgggatatgtattcggctctaaacagggctatatctacatacgcggagagtaccgcaggatacagaaaatttttgagacagcccttgaaaatgcagaggatgcgggatacctgggaaaagatatcctgggagttccgggctttgattacagcatcaccgtggtttccggaggaggagcctatgtatgcggcgagaattccgccatgctcaactccattgaagggaaaacagggcgtcccagaatcaaaccgcctcatctggccgaagtaggtctgtacggcaaacccaccctggtcaacaatgtggagacgctgtgctgcgtgcccatcatccttgaggagggcagccagaagttcctttcttacggcacaactgaaagcggcggcaccaaactggtatccataagcggtcatgtcaaaaacagaggcgtgtttgaggtgggccttggcatttccctgcgccagctgataatggatgagaaatacggcgggggcacgtctacaggcagaaaacccggatttttccacatgggcggccagtccggccccatcggctttcccgaacagctggatacaccctatacatatgagaccctggctcctaaggggctggcagtgggttccggcgccattgtggtcctggacgacagtgtctgtatcgtggaatatatacagaaggtctttgaattctttgtccatgagtcctgcggaaaatgcactccctgccgtctgggcacgacccgtattctggaactcctcacggatttcgtggaaggcagggctaaggacggggatgtggagcgcctggaatacatggcccggcaggtgtcccagctttcggcctgcggcctgggccagtctgtgaatgttgccctgatgtctgccctccgccaccgcagaggcgactttgaagcacatataaacggaggcgcctgtcctgcgggagcctgcgcatgtcatgaaaacgggaggaataaagcatgtctcaccatatagatccggataccaggatacatattgaaattgaccatataccatgcgaggtggcgccggagaccaccatactttcagctgccgccgggctgggaatccagatacccaccttgtgctatatgaaagaactggctcctgacggctcctgccgcatgtgcgtggtggaagtagacggcgggcggaaaaaagggcttgtcactgcctgttccgagcactgcaccgaaggcatggtcatttccacccgctcagaaaaggtgatggaagccaggcgctttgtcctggacctccttatgagcaaccaccgggagcactgcttctcctgccctcagaacggctcctgcaagcttcaggattactgtatggaatacggcgtggagtataccagctatgacagtggaaagcgggtaaacgccccaaaggatacgtccaatccattctttgaatacaatccgcagctttgcatcatgtgccggcgctgcgtacggatatgcgaagagctgcagtgcagaaacgtaatcagcctgaaggaccgcagctttgatactatcatcaccactgcctacggcaggccctggtctgagaccacctgtgaatcctgcggaaactgcgtttcccactgtcccacaggagccctgtcagccaaggaccacaaaaagtaccgcagctgggaggtcaggaaggtcaggaccacatgcccccactgcgccaccggctgccagatggatctgctggtcagggacaaccgcatcgtgggcgcagaaccggctgacgggccgtccaaccacaatctgctgtgtgtaaagggcaaattcggttcctacaaattcgtgggttccggcgaccgtctgacccatcccctcatacgaaggaacgggcagcttgaacaggcttcctgggatgaagccctggattacatggcagaacagttcagggaaatccagaaaaagtacggcaatgacgctatcgccggtttctcctgttcaagagcacccaacgaggacaatttcgtgttccagaaaatgatgcgcgctgcctttcgcaccaacaacgtggataactgcgcccgtatctgccactctgcctctgtgaccggtcttgccatgacccttggttccggcgccatgaccaatcccattgcggatattacaggggatgtggatgtgattctccttgtaggctccaatccaaccgaagcccatcccgtagcaggcactcagatacgccgcgcagtcaggcggggcaccaaactgattgtggtggatcccaggaaaattgacctgacaaatgacgcagccctgcacctgcagataaagccgggcactaatgtggcctttgccaacggtatgatgcacattatattgaaggaaggcctggctgatatggatttcatatcctcccggacagaaggctttgaaatcctggaacagattttagaggattatccccctgagaaggtggcccaaatctgccacatccgtcaggaggacctgatacaggctgctcggatgtacgcaggcgcccgcaaggcgcccatcatatactgtctgggcgtaacagagcattccaccggcacagaaggcgtcatgagcctttccaacctggccatgatgaccggtaaactgggcaggccaggctgcggcatcaacccgctgcggggccagaacaatgtacagggcgcctgcgatatgggatgcctgccaacagatttccccggctaccagaaggtggccaacccggacgtcatccacaaattccagacagcgtggagcgtggaattaaataccaggcccggccttacctccaccgaggttttcccggcagccataaagggcagcataaagggactgtatatctttggcgaggacccaatcgtgactgacccggacacgggacatattgaaaaagcattaaagagcctggatttcctggtggtgcaggaacttttcatgacagagacagctgcctacgctgacgtggttcttccgggcgtcagctatgctgaaaaggaaggcaccttcaccaacacggagcgccgtctccagcgggtccgcaaggctgttgaaccagcggggctggcaagggatgacatacagatattctgcgacgttatgggcaggatgggatatccctgccattatgacagcgcagcccaggtcatggatgagatagcctgtgtaaccccgtcctacggcggaatcagccacgccaggctggatgcgggtgagagcctgcagtggccctgtccatccaaagatcatccgggtacgcccatactccatgcgggcagattctccagagggcttggatatttctatcccgctgtttacaaggaatccagggagcttccggatgaggagtacccaatcctgctgaccacagggcgcatgctctaccactataacacccgtgccatgacaaaacggaccgagggcctgaatgaaatctgcagcgaatcctatatcgaggtcaacgaggaggatgctaaggtccttggcatcagccatggagacaaagtacttgtctcctccagacgcggccggattaccagcaccgcgcgggtgggacagaaagtcagcccgcaggaggccttcatgaccttccacttcgcggacggcaatgtgaaccggattaccaacgctgcgctggacgacctggcgagaatcccagaatataaagcctgcgcaatccgaatccaaaaagcgtgatggaaaggaatataaaacatgatggaattcacgaaacagtatcctgtcatacggtatgaagacggcagggaaacgccttccatggacgaagtgctggcggaatgttccctaaacgtccatatcaacggccgctgcaccgaagtccttcactgtattccggaatatctggaggagatgctcttaggcaggctttatacctcaggcgtcatctcctcccctgaggatataatggatttaagcatccgtccgtctcttaaccgggcggatctgaaaatccgggaaacggaccgcaccatggtccgcctcccggatttacacatctgtcctgatcacatactctctctgtcacagcaccttctggatgcctcggagctgtttcgcaaaaccggcaatgtccacagcgtaatgctgtgccgtgactgtgcggtcctttacatgacagaggacctggaccgaagccgggcctttgaaaaaacagtgggccgcgccttaaaggaccgtgtggattttgcaggcaccagtgtatataccacaggccggattccgcgccccattgcagaaaaggccatatgggcaggcatacctgtcattgtatcccgctccgcacccacagaccttaccctggagctggctgctgaatacaatctgactgtcatcggatttgcccgcagaaacagaatgaatatctaccgtacatcccgggatggttcagccaccccttcttaaccgtcccctgtcatgccagatatgtaatcacaggaatggtgagcacggacaggatggaggtcaaagcaatgcttttggccgatatccttccatccgtggcgccatattccttctcaaccagcataaccacgctgcccaccggcattgcaatcaaaagaataaaaattccataagaaaccttgtcaacaggcagcattctcataaacggtatgcagactgccggtatgaccaaaaggctgataaaggcaaagagaagctgctttttgtctgttaccagggactttaagtccgactgggccaccatgatgcccacagtcatcatggataagggcactgccgcgtttcccatgctgtccacaaaatcagctgccggctccggcacccttatgtgaaaggcaaatataaaaattgccgtgatacaggcgcccattccgatattgagcatcttcttccagggaagcccggcccgttttgccgcttcctttccagcgtcttcgcaatcatcccttgtccccatagccaaaaggatgccgtaagaataaaccagaagattataaccaacaatataaaatgccacgaatattacagcctcctcaccgtacaggctgcgcaccagcgggattcccataaaccccaggttgggaaatatcatcatgagacggtagctgtttacctcccccggcagaagcctcatcatctttgtgaacagacggctcaggacaatgagcaccagaaaaaacacggccaccagaaccaggttctctgctaccatgcggggactgtatgtgattttcttattcagtactccggatatgatgagacatgggttaaagatattaatgataaccgaggacaggctcttagagccggcctgtgagactatgtgcgccttaaaggcaataaaacctgccaacatcataaaaaacaaaaccagcatctgcccggcaatgattcctgcgttcatttctattacctgctttttatcttgattgttccattgtagctgattccattcttattttcaatcattactccataaattaggttgagccggtaagaaaggccctctgccaatcccaccggcttattatgtatggtatctatattaaaagctctgactgcttgtttatgtcttatagtataccggctatttgtgtcttaagtttgactgattggtaaattgtttctaaagaggcttaagaaaatataacagaatcttttgaatttcttgtgttgacatataatactatatgctgtatagtataactatattatatattgtataatatgatgcaactaataatattgtttttagaacagaggggtgcttatgatatttaacactggctccgcgcttttagacgctattgtgctggcagttgtctcaaaggatgcggaagggacttatggatataaaatcacccaggatgtccggcaggccattgatatttcggagtccaccttatatccggtgctgagacgcctccagaaggaggactgcctggaagtgtatgatatggccattgacggcaggaaccgcagatattacaggctgacggaaaaaggcagggtacagctgaatttgtaccggggggaatgggtaacttattcacagaagatatcccagatatttaaggaggcgaagctatgaccagggatgagtttatgaaggagcttgcatatcttctgcaggacatccaggatgaagacaaggacgatgcggtccaatactatacagattactttgaagaggccggtcctgataaggaagcagaggtcatccaggaattaggaagccctgaacggattgccgccatcatccgtgctgacatagccggacatctggagagcggcggagaattcacagaacagggatatcaggatgagcggttccgtgatcccggctatgccatggcaaagcgtctggacctgccggaagagcaggagagcggcggccagggaaacggcagccggggacagggctataaccgggaacagaactttgaccaggaacagagctttgaccagaaacgcggttttaaccatggcccggagcagacttatacagaggagaacaatggaacttccaatccccctccgcccaggaccagcaaggtgataaagctcatattatgggctgtgctcatcattgtggcctttcccgtgttccttggtgttggcggcggtctgctgggtctggccgcgggagtcctgggcattctgacagctgtcctggtgacacttggggccaccacctttgcagtgctcctgggcggtatcgttatgcttccctacggtgtgttccacatgttttcccatccactggatggactcatggcctccggcacaggattgatactgctgggcgccggtgccctgtgcctggctctatccgtactgttttacgggaggttcatccctttcattatacgaagtatcgtaaatgggcttagccgcctgcttcaccgagggaggtaataaaatgaagagattcgtaaaaatatgcgccatcaccggactgatactccttcttcttggcctgggcatcactgccgtttcagccgccatgggaggacggtatacaaacagcctgccgtcccgcctggcctccagggtatggcacaaccacatgccatggctggtccgctggggcgatgaccgggcggatgactgggatgaccgggatgcctgggataactgggatgactggaataacccggatgacccggatgatacagaccgctcccgcggctcctcacagataaagacggtatccgatccctcctatgcacaggccagaaaactggatgtggatatagacaaaggggtaatccgcgttttagaaaaagagggtatttcccaaatccaggtcaatgtacaggatacctataaccgcacacaatgctacatggatgaattcacactgaaggttaagagggaatcaggacgcagccggagcaatgaggctcctcgaatcgagattctgattccggccggatacgggcttgacaaattgtccctggatctgggcgccgcggagtgcacggtccttggtgtcactgtctccaaactggagattgacacaggagttggcgccattacattttcaggcactgtcaacggggatgtggaaatcgagacaggggtgggagatgtgacccttaacctgaccggttcccaagacgggtacaattaccaggtggagtgcggcgtgggaagcattgatgtgggcgctgaacactacagcatgctctcacacgaaactcacatcaacaacaaggctccctacaccatggaactggaatgcggcgtgggaaacattgctgtaaactttgaccaaatcttatagattcctacagaaaaggagatagaactatggataagaaattataccgttcaaacataaataaaatgctctgtggcgtatgcggaggcattggagagtactttaacattgaccccaccatcatccgccttatttgggccatctttgcctgctccggccccggaatcatagcttattttgtggccgccatcatcattcccctggctccaaactaaggctggctaattatccgccttttccgggatctgcagccatacggaggcataaaacataccggctttttgttcaaataatgtatctcctccatacctgtccgcaatttcccggatggaggatacgccgattcccacccctttccgcttggaggaaaggggtgtttttccgtcagtgtcaaacggcactgtcccggaacaggtgttatctgtcagaaataccaggctgctgtttttcctgaatatccgcagccggatggagcatttaccattcttctcacgcagacaggcctccaccgcattttccagcaggttgcccagtatcaccgtcacctccgtatccgggacatgacattgctccgggtagtccgcctgggcttcaaaacggattttatgcctgcgggcctgggaggcatagtagcagattaacgcattgattacctggttgcggcagtatatttctatgatatcaggaggcagctctgtcttataaatctcaatatactcggacagacccgccctgtcattcctctctatgtaggactgaaccacggccagatgctggcgcaggtcatggcgcgcctttttcatttcctccatatgggctgatacggtttcatactgctttttctgggccagaaggctccggtccgcatactttaattcctcctccagctgtgtctttctgcgggatatttctaacaccttcaaaaaaacataggacacataacaggttccaagcagcatcagatacctggaaatcaggaactgccaggaagcataggcatacacatcctgcaccgtgcagtacagcatgccgaacaaagtggaaaacagcggaatcttccacatgtactgccacatcttcctgtcctccatcttcagggcttccctcacggtatgtcccagaaaatggagtataaagggataggtgataagcagaatcgccaccctggccgtattatagatgagatacggatgtctgtctgaaaagtcccagaaaaaccggctttcaatgaaattggcattgccaaacacaaaaaaggaccaggacattaaaagcaggtatgtgaacataagcttctggaactgctctctgattaataaaaatgaacacatcagattaaacagcataaaaccataccgcatcagggtagtccagcgggcagctgcctcatagccttcctgattgataagatagaaggctgcgctgttcacgcacgataccgctgtcagcagcaccaccacatacctgtaccggatttttaatttatccctgtgaatccaatacctgggaaggccgaagggtataaaatccagaaatggaaacagtaatatcatggcagtatctatcataacaaatcctccccccttgcccgccggaacatgtactgtgaaaaccggctcttgatttccttatggtcccgcttgcgaaacggaacacgttcaccggtatccataaggaattccagctcctccatgcgcctcacgcggtccatgttaatgatgagtcccctgtaacagggcaggaattggggataggcggataataccgcctccagaaacgcaacggtcacacggtatctcaggactccccgcatatccgtatggatctgcacataatggccgtcccggtcacaccagaggatttcctttaacaatatcctgtcatcacccagggcaatgaaacgggcgttcattatcttctccaaacgggccagtctcatggtttccccgaacgcctcatatgtaaagggttttatgagataaccgcaggccctgaccccatagctgtccactgcatggtcgcagctggtggtaacaaaaataagggcagcctcctcatccaccctccgtatctccctggcagtgtccatgccagacatcccctccatatactgatcaataaaaattacatcatatacctgaggccggaaggcgtcaaggaacctggtcccgctttcaaactcatccagttccggctcctccccctggtaattttcacgtatatagcgcagaagatattcctttatctcctgtctgcacaccgctaaatcgtctataatggcaacttgcataaaatcctccccccgtaccggcaagaaatgctttcctaatttcattttacaaaaaacaaatccgtatggcaaatgcaaaatcgggccaaaacctgcaaaatgaagccaccccattgaaaatatggcagaaaaacgttatgtttgaattaaatctaagaacccatatacgaaagggggagcacggcatggaaatcatcatatgtgacgacaacctgtcagaacgatccttaatgatagattacattcttaaatgggcctcggaaaaacaccttgaaatacagattaatacctgtaaagactggatggaactggccgctgccctggaaggaagggaatgggacatagtcatcgtttccctagacggcgtgagaggcctggataccgcatccagcgcgcagccgctctccagaaggcttatctggatttccgacctggatttcggagtacaggcctacagaatgtgtgtgagctacttcttcatgaagccggtcagctgtcagaaaatgcagcgggctctggagtgtgctctgaaagggcagggcacaacgtgatatctggagggatgtaaaatgaaacagagacagcatacagacatttacaaaaagacgcgcaaacagctggagcaggaaaattgtgccctgcagaccctggcggaactggatggactgaccggactgtataaccgcatcaccatggaacgcagggtggacgaccatctgtgccggaagcagccgggaaccatgattgttctggacctggaccatttcaaacaggtaaatgaccgttacggccatattgccggggatatgctgctgtgcaccattgccaatgtgctgaaaaaaatgttcagcggccgcaatctggtggggcgtgtgggaggagatgagttcgtaattttcattccctctgttctggacgacccaatgacagccggagaatgcctgcggattcaggagcggttccgcgaagtgcggctgggtgattccatcctaattaagctgtccatcaccatagatagtgcagacagccggacctgcaccaaataccgggatatgtttgactgtgcggatcagaaaatcatggcaaaaaagcgccttcgcaatctaaaggatgacaccggcctcatatccccgtccagggaaccggccggcatacagcccgatatgagtctgatcgccatggaaatggaggaaaaggaaacccagccaggagcctactgccaggattatgaaacctttaaacaaatctaccgcctggaagaacggcgcctcagaagggataagaaaagagctttcatcatattgtttacactgacagatagaaataacggttttctccccctggacaaaagggatgctgagatggatattctgggggagaaaataaaacagagcctgcgtatgggagatgtgtacaccagatacagcagctgccagtacctggtaatggtgctggatgtgtccatagaaaatgtgggagtcatcgcggaccgcatctgcagcgcctactaccagatgcatcaggaaacagctgacaacctgattctgcaccacagttaccctttaaagccggcacggggacggcccagggcctcccgtccccagtgaagccttaacctgtcaaatacccactggaacagcagcggcagcacaatggcccatataagataaaccaccctgaactgaggcagagctttgggaaaatagcaataccagaggtctgccttatactgttcaaaactgaatccaggaaagagagcagtgtactttgccagtgcagcgaacagggttttaagaaccatgagagccatgatatgatgcatcatcaccgcatatgtatggctgccaaaatacctgatatacctgccctccccaaatgctccggccaggatgcgggataccctgagccagaacgcgattcccagtgcagccgtgacatagggcatcaggattcctgtaaaaccgttgcagaaggccacggagtagatgagggggcggccggacatggccagaagcagccaggcagccaggataatgccaaagtacagcccatggtctgccctgtcccctgcctccagtttttccttatacagggtacctgcgccgtagcagggcagcaggaacatcatacgcaccagcgtaagccatccgccctgataccggccggaaaatgccagaaggatgccccatacccctatggacaggtacaaaaaaaacactgcatattcagaatccacccgctttaaaaggcggcgtaaaagtacattggccatttccaccagaaacagggccggcacaaaccaggcagccagattatattcaaactgatgtcctgtgataaatggttccacaaacagattccataagctcaaatctcccccgaaggcaaagccggctctgtgaagcccctggacaatcatgccataaatcagattgtacaccatatacggccccagcagacggattatttttttcttcgtataggcacccagccggtgctcgcttccctttttgtaaaaatacccggagataaaggcaaacaggggcatgtgaaaggagtagtagggcaccagtcccccgatgtccagataactgttattgagatgcccgtccaccacaaaaaacatacccagggccgacaggatgcagaactgcatattgaaccccgcatagggctgccccttcggcatctttgcagcccggttcccgccgggacgggccgtatcaaatcgtccttctgccatgtccggcctccgtcttatacattttcctgaaattcgatggcgtcattcccatgaccgacttaaacaccctgttaaaatgagtgatgttggagaatcctgtgtcccggctgatttccgtgatatttttattggtttccataaacatcctctgggcattcatgacccgtgtaacattcacatactggataatggtgctgttggtataccgcttgaactccctgcacaggtagtagggactcacataggacatctgggccagctggtctatggatatgtcctcctggtaattctggtggatatagctgattacatctgttatccggttgcgcttttccggcttcaccggtgtctgaatgtttctggcaatggtcagtaaggccatgtttaacagggtatggatatagtcctcatgataagcctgagggtcgtcctgttccctaagcaggtcatccagcatgcggtgcaccacctgcttttcccgctggtccggcttatataccccggttcccttttccagcacctttaacagctgcacggagtctacttcctccttagaaaaatacaccaggagccgcttaaacggcacattctcctggccgtaggaatggtgcatcacatagggggaaaatataaggaattctcccggatggatgcagtaaagacggtcctggataatgtgaaaccgttctccttcctccagataatataattcaaaataatcatgataatgggactttgacatattgtcattgactccctgtatgcgttcgccggcaatgctccttccctgagccatcataattccagcctggtctatcaatccgttttctcccttctttggtacatatatccaattcccatgtttttatatacgtaaaacacacggaaacaccatagcgcttccaaattaatacagcaagatatgtttaatttccaccataatactgcaaatattgtctagtttaggcggccttaattctatatgataataacataaaaccggttgaaataaaacaaggaggcaacaatttatgaaggtttgtacgaatgcttacacggtcgccaaaaaggacagttacttttcagtgatgaccaacagtgtggaaatccgcattctttttctgacagattccatcctgcgtatcagggccggatttgacggcgatttcgcggaggaatcctacagccttgtgatgacagcatgggaagaccggatggatgatttcctgaagggccgcagaacacgggtggaagcggcagacgcagtcctgtcggacggggacagggaggcagtaattgagggacgtattctgaaggtagtggtggagaaggatccgtttcgcatctgcgtgtatgacaaagagggaaccctgcttcacgccgacatcgtggatttggcctatatggaggacagcaaccaccgccggattcacaccagtgagatttcaccggaagactgtttctacggttttggagagaagagcggcagcttcaacaaagcccagaaattcatgagcatgagccccaaagacgccatgggatacaaccccagggaaaccgattcactttacaaacatatccccttttacataaaattaaaccgcggaaccaggaaggctgtggggtatttctaccacaacacctgtgagtgcgattttgatatgggccgcgaaaagagcaactactggaagccccacagccgttaccggacagacggcggcgacattgacctcttcctcattgcaggcccctccgtgcgtcaggtcgtggagcgctatacggatctcaccggcaaatcagccatgcttccccggtatgcgcttggatacctgggatcctccatgtactatccggagctggataatgactgcgatgacgctatcctggatttcatcgacaccaccagggaagagaagataccggttgacggtttccagctttcctccggctactgcaccgtggaaacggacaaaggcatcaagcgctgcgtctttacctggaataaaaagcgcttcaaggaccccagggaattctttgctcagatggaaaagagaggagtaaccgtgtcccctaacgttaagcccggcatcctcctgattcatcctaagctggatgagatgaaggccaaaggcatgtttataaaggccagcgacagcgatgaacccggtatcggaacatggtggggcggcaagggtgtgttcgcagactttaccaacccctccacccggacttactggaaggaaatgcttaaggaaaatgtcctggaatacggcaccagctctgtgtggaacgacaactgtgaatatgacagcctggtggataaggactgccggtgtgattttgagggcaagggcggtaccatcggccagctgaagtccgtcatgtccaatatcatgtgccatatcacggatgaggctattcacgaaaccttcaccaacacccgcccttatatcgtgtgccgttccggccactgcggcatccagcgctatgcccagacctgggcaggagacaacctgacctgctgggactccttaaaatacaacattgcaaccatcctgggcatgagcctttccggcgtagccaaccagggctgcgacattggcggcttctacggaccatcgccggaagcagagcttatggtgcgctggattcaaaacggtatattccagccccgtttctccatccactccaccaacaccgacaacacggtgacagaaccctggatgtacggcgactgtacggattacatccgggaggctatcggactgcgctaccagttaagtccctacctctactcactgatggagcgggcccatgaaacaggacttcccatcatggagcccatgtgcagtgcattccaggaagatgtgaagtgctacgaggagggcgtggactttatgctgggtgattccctgctggtggccaatgtggtggaaaagggcgccgtctccagaaaggtatacctgcctgaaggcgaaaccttctacgatttctatacaagggccgcctatgagggtggacgcaccgtggagctccctgtggacctgggatccatacctctgtttgtgagaagcggagccattattcccatggcggaagacaggcttgataacctaaagacccagcaggcagaacacctgcgaatcctgtgcgcggccgacagggacggccggtttgagctctatgaggacgacggcatttccatggactatgaaaagggaggctgcctgaagacctccataaccatgacagccggagaacgcactgttttggatttccatcaggaaggctattatgagacagccgtaaagacgctgtatctggatatgatacaccgtgagaaagcaccttactgggttaaggcagacggcgagaccattcctcatttcctccacaggagaaaatttgaggatgcggattgcggatggtattacagccagaggcttaagtccgttcagattaaataccctaatcctaagaaggattatcaggtgatcgtatcttttgagcagttcgacctgattggtatgtaaagacaggcattcgcttcccctcccgcttacagaggggaagccgctacatagaaaggggatattgaaaatgaaaaaatttgcagcagcaatggcagcggctttgagtctggctgtactggggctttccgggtgcgcccagagcggcgccaagaccagcgcggaggcctcagcggagaatcccatggtgcttactctggctcacggcctcagcgagacccatacggtacatattgcgatgacagaatttgcagacaaggtggaggaacggacaaacggacgaatccaggtccgcatccttccaaacggccagctgggttccgaaaatgagaacatggagcagctgatggccggtgtcatttccatgaccaaggtatctgctcccggccttgccacctacaacgaatcctatcatgccttcggccttccctatatctttgacgatacggaagacttttaccatgtaatggattctgatccgatgcaggacttcttcctttcctcctctgacgacggattcgtcaccctgacctactacacctcaggcgcccgttccttttacaccaagaacaaggcaatccgcacgccggctgacttaaaggggctgaaaatccgtgtacaggatatgaaatcccagactgatatgatgaaggccttaggcggaatcccggtagccatgtcctacggcgatgtatatacctctctccagaccggtattatcgacggcactgagaacaatgaaacagcacttaccaccggcaaacatggcgaaatctgcaaggtatattccacagaccagcacgccatgattcccgatgtaatggtcatgagcgccaaggtatggaagaccatcagtccccaggaccagaacatcatcctggaagcagcccgcgaatccacggaaagccacaagattgcatgggatgccgccattgatgaggccatccaggaggcagagtcccagatgggagtggaattcgtaaacgatgttgacaaggatgcgttccgccaggccacaagcggtatgattgacgattactgcgcacagtatccgggtgtgaaggaactgcttgacaccattgattcggtagaataaggggaggtaatcacatgaatgaaatattatctgtcatcaaaaagtggatgacccgtcttttagccggcatagccactgtactgctgtccgttatgacccttctggtcctgtaccaggtatttacacgctacgtgctcaacagcccggctgcctttaccgaggagctggtgcgttacttcctgatttggaccggtttcatcggagctgcctatgccttcatcaccagggaacacatgtgcctggtgctggtgcgtgacagcttaagcccggcaggccgccggattctgatgacagttattgatgtgctgattctgctctttgccgtctttgtcatcaccatcggaggattcaagctggcgttaagcgcccagaaggtgttctccgcgctgctggggattcccagaagcctggtatatgccatggcgcccatctccggactgttcatcatcctggcacagattatcaacatctatgaggatgtaaccggaatcaccatagaaggagggaatgagtaatgagtatcggacttacaacagtcattctgtttgcggtatttggcatcctgctgttcctcagctgcccaatctccgtcagcatcgtaatcgcatccatcgtaactgccgtctccagcctgtcctgggaccagattaccttcatcaccatgcagaagatgaacagcggcgtggagagcttctccctgcttgccatccctctcttcatcctggccggcaacatcatgaataacggcggtatcgccagacgccttgtcaactttgccaagctgtttgtgggctggattccaggttccctggcccaggccaacattgtgggcaacatgctctttggcgcgctgtccggttcatccgtggcagctgcatctgccatgggcggctgtatctatcccatccagaaggacgagggctacgaccctgcctttgccacggccgtcaacattgcctcggctcccaccggactcctgatcccccctaccagcgcattcatcgtgtactccacagtagcaggcggtgtgtccatatccactctgttcatggccggatacattcccggcatactgatgggtgttggctccatggtggtggctttcatttacgccaaaaagcataaatatccggtatccggccgcacccccatgaaggaagccgtaaaagtgacattggaagccattcccagcctgctgctcatcatcattgtaatcggcggtatcgtgggaggcatcttcactgccactgagggagcaggtatctgcgtgctttactgcctgattctttccatctgctacaagagccttaccgtgaagtccttcatgaagattctagtaagcagctcatgcaccagcggcatcatcctgttcctgatatccgcttcctccgccatgtcctttgtcatggcatactcaggaatcccggcagccatcagcgagggcatcatgtccatatccaccaacaaatacgtgatcctgctgctgatgaacataatcctgatggttgtgggaatgtttatggatatcacgccggctatcctgatttttactcctattttccttcctatcgcccagagtttaggaatgactgacattcagttcggcgtcatgttaatcttcaatatgtgcctgggcaacatcacgcctcctgttggttccgtactgttcgtgggctgcggcatcagcaaaatcagcattgaacaggtgaccagaacgctgcttccctattttgcggtactgttcctcctgcttatggccgttacctatataccggcgctgtcgctgggtattccgggcctgatgggattaatttaggaaaatcataaaatgcgttttagtatgtaacataacagcaggccgcccgggcattatgcccgggcggcctgctgtctgtgtatttccctgacctgttgactttggctcctgtccgcctaacaatcacatgtgttctcaacataatgaagaaattcaatccgttcaggacttactccttccttatccgtgctttctctacagcgccttctctacagcaccttctccaaaaatcctctggctctgtcgctcttgggattcttaaagaactcatccgggttggcgtcctccactatctgcccgtcatctataaaacagatgcggtccgatacctccctggcaaatcccatctcatgggttaccagggccatggtaatgcctgtatgagccaggttcttaatgacctccagaacctcctttaccatctccgggtccagggcgctggtgggttcatcaaacagcataatctgcggctccatggccagggccctggctatggcaattctctgcttctggccgccggacagctttccaggataggcgtccgccttctccaccagacccaccagtttcagaagctccagggcgttttccgctgccttgtcctttggtatcttgttcaccttcaccggggcataggtcatattttccatgaccgtcatatggggaaacaggttaaaatgctggaacaccatgccgatattctttctgacagcctggatatcagcctttggaaccgtaatatccgtaccgtctatgaacacctgacccttggtgggcttttctaacaggttgatgcatcttaagatggtggacttaccggatcctgagggaccaatcagcgtaaccacctggcccttctcaatattcaggttaatcccctttaatacttccaggttaccgaagcttttatgcacatcacgaaactctatcacttctgttcacccacctttccagacggctggcaactgccgacaatatcatgacaaatacgtaataaataaccgcaatgaccaggtagggttcaaagaaccggaaggtcaggaccgtaatctggtccgcagcccttaaaagctccaccgcaccgatgtaggacaggatggaagactcctttaacagggcaatggcctcatttaccaggctgggaagtatgtgcttcacagcctgcggaatgatgatgtccttcatcatatccccatagccaatccccagtgacatggacgcctcatactgtcccttgtccacacccatgattcctccacggaatatttccgagacataggctgcggagttcagtgtaaatgtaaggattccggactgggtggtggtcagtgtgaaacccagcagctgcggcagtccaaaatggacaatacacagctgtaccaggagaggcgttcccctgaaaatggatgtataaaaccttccgaaccatatgagaggtttatatttgctgattttaacaagagccagtacgatgcccagcaaaaaccccagcacggcgcagattgccgtaatcttcagggtgagcagtgctccatggtataggaatggccagtattgccaaacgctggtaaaatctaatttcatatgtgcagcccctttttacattgccttagtccaggatgaactgttcgcttaaatggcttgcgatgatatcatccagttctccgttttccatcatttccttcagtgtgttgttaaatgtctcatagtaaggggattccttggggaaaccgatggcaaaacagtcatcatccaccttatccataaggctcagcttaagcccctcgttgttctttaagaactctgttgcgcctgcgccgtcaacgatacacgcgtcggccctcttactctttacttcctcgatacaggcagggctgccctggatgccaacggtctccgccccttccacgctctccgctacctgctggtagttggtgccgaacacataggcaatcttcttacccttcagagaatccaaatccgggtaattatcctctgccctgtacacaatggcatttctgggatagaagaagatttcgctgaaatccagtgttttctccctctctgccgtaggcgccataccgccgctgcagaaatcaatctgaccagcctggatagcagccatcaggctcttaaagggcatgtccacaaattccacctggccgccgtttttttccacaacagcttttacaatatcaatattcatacctacataggtcttgcttccgtctgccgccatctcgatggattcaaacggaacaaaggtagcggaacagcccaccttcacggttttgccggaaaatggattctctgtggcagtgtccgcggaattctttcctgcttcatctgacttctcctcagcgcctgccgccggggtatccgccgcgtccttacctgccccgtccttgtccgcagcctcctgtgcggcggcctgagaaacggccgtggtggcatctgccccgccggaacacgcggtgagtgcgcctgctgtcagaacagcgcacagcaatagtgcaatttttttcataataattctcctctctgttatatgtatataaaaataaaaagtctgctttctgcaaaccttatcccttccctctgcctgaccggcattaataaaggaagaacttgcataatcatagcataaatatacatcagattcaatagattccgggcttttttctgcccctgtctatggcctttcccacccttttttcccagattctcactctgcctcttactccgtaataccagatttatccaacccggcccatgcctttggttgacttaccacctgtccatgttataatgaaaaccagaaatgaataaaaggagcaatttaccatgtcatatgaaatagacggcaggacaaacggacctgccataacctggcccggccgcgccaggattgctgtcatggtcacatttgattttgacgcagaatacctgcgcatgtccagggctgcctccaaaggtaccaccatcggattcacggattattcccggggccagtacggtccccgcgaaggtctgaaacggtgtctggatatgctggacacccatgatattaaatccaccttctttgtgccgggaatcgttgcggaaaaatacactgcccaggtggaatccatccatgccagaggccatgaaatcgcctgtcacgggtatatgcatgaatccgtccgcggcatatccgcggaagaagaaaacgaaatactggaaaaaagcgaggctatactgaaacgcatcacgggacggcgtcccgtgggacacagggggcctgagagcatcatccatccatttacccctgagctgctggcacagcgcggttacctgtacagttcctccatgaaagactgcgactgggcatatctatgggaaaaggacgggcaggtccttccgctggtggagctgccgtgtgatattaccatggatgactttacctatttttatttcaccttcagcgaccctgctgtgcgctccatgtataccaaccgggaagtattcggaaactggaaggatgagttcgacggccttgtggaagagggaaataaaatctttatcctgaagcttcatccccagatgataggacgcgccagccggattgccgccctgggaaacttcattgcctatatgaagcgccacggcgcctggattaccacctgcgaggaagcggcgcggtatgtactggcacaggcagaagccaatcaggagaatcctgaaaaaggaggtgcagccctatgatgacctggcctgacaacaagcgtatcgctgtcatgatggcatttgatctggacgcagagaccatgtggaccaccagaggcgacggcaaccatgaccatataaccaacttatcccggggcgcatacggccccaagcagggcgtacccagaatcctggacatgctggatgtgtatggggtaaaggcaacctttttcattcccggcgttatagcggaacattatcccctggtggtaaaggaaatcagccgcaggggccatgaaatcggatttcacggatacctccatgaggaatccaccgccacttcctatgaggaggaagatgccaccatgacccgctgcgagaccatcataaaggatctgaccggacagtccatagcaggacaccgcggaccggggggcgtgatacacgattacagcctgagactgtttctggagcacggctacctatacagctccaattggagggactccgacggtccctttatccataccatagacggccggcaggttcctctggtagagcttcccaaggattctatttttgacgataccgcatacgatttttacacggattctgctccggaacggtatgaactgaaatccccccgggaaatgttagaaatctggaaggatgaatttgattccctggcagcggaaggcaggatgattaactttgtcctccatccacagttcataggacgcgccagccgggtaaacatgctcagtgagcttataggctatatgctgtcccatggggcctggattgataccaaccgggcagtggcggagtatgtgctggaaaaccgggatttattaaagcctgacagataaatcttatccccgctttatctgctctgggccaactttcataaaacataacagcaggcgcctcctttcagactcacgtcaaaaggaggcgccctcatgttcagataaccatattcaaataaccaatttcagataagcccatccatatgctcatatcatatacatctcagaacaaggtctgctgctcatactcacaatccctttccagctggggcggttcctggcccagcagttcctttgtctttgcgctgtccagaatccattccctaacctgttccctctcaagaaccagaggcatacggctgtggacaggggccatggacgcattggcctgggtggtcagtataacgaagtgttccccgtcctcatacctgccataaaatcccgccaggaacagaatccggctcccttccttagtgaatgtaaatttctctttattcttattccactcataaaaccaagaaaccgggaccactgcccggcgcatgctcacactgtcccggaacatccgcttttcaaacaccgactctgacctggcattaaaaaccagcccctttccgcccggcccgggatatccccatttctgcctgcagacccgcagactcccgccccggcccgcgtaagaagctgccccggcgttctttgccggggccggtacattagatgcctcttccagggctgccacaatgaccggcgccgtgtcgcccggatggatgtcccggtccagaactcccagttccagtttccagtccttctgctccgttatgtctcttatctcatctaataactccgcgctgaaatgatatctgccgcacatgaaattcctgcccgcctttcctgagtattccattcctatggcggcattttgtccgcctactgtattatatacccaaacccttaaaaatcaatgcaggcagtgagcaggaacgcagccaaagctccattacctcacagcttccagtatcccctcactgaatgtggggtgagggaatataaccttagccatatcctccagcgtcagcccgttggccatagccaccgcaaactggctgatcatatccgtggccctggcacacatcatctgggcgcccaggatgcggtgtgaaccgctgtccgccaccacctttataaatcccctctcctgctgggacagaatggacttgccgttggcagacatgatatacttctttgtcactgcttccattccccgggccttggcctcatctgcgctgattcccacgcagccgatttccggattggtatacacacaggacggaatgatatccgtacggatcaccatatcctctcctgccatatgcgccactgcgtttctgccctgggcagtggctgcatgggccagctgaatgccgcccgtcacatcgccaatggcatatatgcccgatacgctggtttcatatttttcatccgtgataatacgcccgcgttccatggccatatccttcacttcccggctgctttcatcggttataagaccgcctgtataagccctgcggcccgtagcgataaggatgccgtccgccctggcctcacagggtttgtccttttccgtatagcggcatataagtccttttccatcctctgtctgaaggatctcctccacctttgcccccgtatggatatccacatttcttttcttcataatcattttcaggttctgggcaatttccttatccatggtgggcagaatacggtccagggcctcgataacagtcacaccatggcccagggaactgtatacagacgcaaattccataccgattactccgccgcctataataatcagatgttcaaacatatcctttttgtccagcagaccgtcactggtgaccactcccggcagggatgagcctggtatgggcgggcacgcgggaacggaaccagtggcaatgagaatatggctggtttccagaaccacctggtcctgtttctgtccgcccggttgttcctctgatctcccctccggtttgccttccgattttccttccgattttccctctgatgtatcctcagccgccgccacctttacatgctccctgtccagtatggttcccgtaccgtaataaactgaaatcttgttggtcttcataagggaggcaatgccctttctcagctgttccagcacttcatcctttcgtttctggaccatctccatgtcaaccgcgggttcccggaccgtcaggccgatggatggccctgactgtaattcatggtacagctctgctgtgtggatgattgttttggtgggaatgcatccccggttcaggcaggtgcctcccagctcacggttttccaccagagcgaccttcattcccttttgaaccccttcaatggcggcctcatatccgcccggccccgcgccaatcaccaccaaatcaaatttgtcagccatataaactaacctctcttccatttatgttctgcgtttacagcgattccctcacaagggtcatgatatcctcttttatacggcatgactgcggttcatccgcgcccgtatattcccctgcctgaaacgcgtctgttcccacggcttttaccgccctgcatatatcctcctccgcataggcgcagcccttaagctgttcagccagcattccgatcatctcctggtccatggcgtctgaaaatacattcacatcctgtatcatgccttcatccacatgaaactgtatctggatattgccccatggaaaccgtttctccatttcatactcaaagggaattttccttccgtatttccactgccaggaagcaaatttctctgtccgggcatctatgtccggctgaggcagctccccttcctccatccttacggcaggctgaccataaaccttggaaaatgcctccaccaacgccgattttacttcctccaatgtgatatccggcttaaactcgcataaattggccaccctggactttacagaggtcactcctttggaggccagcttctcttttgatacattcagataccgcgacatattttccttgtccgcccgtatcagtatggttccgtgatggtagcagccgtcccctgttctgtaaaatgcgttgcctgagaacttgcgtccatccaccgtgatatcattgcgccccgtcttctcagcatggattcccagactccttacggcttccagtattacatccagctgccgtgaaacatcataatcgccggcgcccacaataaatgtaaaattcagattccccagatcgtggaacaccgcgcctccgccggagagccggcgcactaaatatccgttctcctgttccaggaaattcaccctgcattccctccagcaattctggttctttcctatcaccaccgtatggcggttctgccacagatacagaatgcaggttccctggggaacatgaagggtcatgtattcctccatggccagattccggtaggggtatgtattatctgtctccatccacacaagtctgtttatcatgtcagtctccattctatagaaaggctgcctgggcagccccttccccggccatgtacggatatccgggatatccatacataaccagggacatgccggctgtccaggcagtcctatttcattttcatcattcccatgtatagcgcagtaccggcttacgggccgccgtaacctcatccggtcttccaatcggtgtaaggtggggcgcactgtgaagtgcctcaggatctgccagggcctgctcgtaaatcttatggaatacctcgattgcctcatccagtgtctccctggactctgtctcagtaggctccaccatcagcgcctcatgtacaatcagcgggaagtacatggtcggcggatggatgccgtaatccagaagggccttggcgatatccatggcggatatatccttgtcatgcttcatcttctccagactcatgacaaactcatgcatgcaggtctcgttgtaggccatgtcatagacatccgacagcttcaccctcatatagttggcattcagcactgcattgcgggcagcctccgggatgccctcctttccaagggtcaggatataggacaatgccttaaccaccaccaggaagttgccgtagaacatcttcacatccccaagggaatcctgcgccttcacaaagtggtatgtatcctcttccttttccacacgcacgccaggtataaaggactttaagatttccttgcagcccacaggaccgcttcctggcccgccgccgccgtgaggtgtggagaatgtcttgtgcaggttcagatggaccacgtcaaatcccatgtcacccggccgcacaatgcccataaccgcgttcaggttggcgccgtcataatagcacagtccgcctgcatcatgtacgattttggtaatctccagaatgttcttgtcaaataatcccacggtattggggttggtcagcatcagaccggctgtgtcctcccctaccgctgcctttaactgctccagatccacgcagccgtcctccctggacggaatgctcaccacgtcgtagccgcacatggacgcgctggccggattggttccgtgggcagagtcgggaacaataattttggtacgcttggtgtcattgtgatgtacatggtatgccttgattaaaagcagtcccgtaaactcaccgtgtgcgcctgctgccggctggaatgtcattgcatccatgcccgtgatttcgcagagatatttctccgccagatataaaacttccatggaaccctgcaccgtagcctccggctgcagcggatggactcccctaaaaccctttaaagcggctgcttcctcatttaccttgggattgtacttcatggtacaggaacccagaggatagaaaccgtcgttgacaccgtgggaacgctttgccagctccgtataatggcggcttatttcattttccgacatgtgcggaaggcggggctgtttctcacggatatgtgctttttcaaaagatacctgtggcacgtcacagggactgattaaatccagtcttctcccggctgaccctttttcaaatacaagtttcatgaaccgcacacctccttttgtccgcattccctgtgaagcgcctcccgtacagcagaggcaagttcatccatctcttccctggtgttcatctccgtagcgcaccagaggatttccctgtcggaaagcggcagtccgcccaggattcccttgctttccaatgcccttaaaatgtgggcgctgtccgtgcacccgccctcagggcttacggtaacgaactcatggaaaaattcacagttatgctttggctcaagccctgcttcctttaatacatccctgagatagtgggccttggacatgcactggcctgctgccttagccataccgtctgctcccatggctgtcatatatacagaggcggtcagagcgcaccatgcctggttggagcacacgttggagctggccttctcacggcgtatatgctgttcacgggcctggagagtaagaacaaatgcccttcgtccctcatgatcggctgtctcgcctacaatacggcccggaagcttcctggtcatggctgccgtggctgtcataaagcccagataaggtcctccaaacgccagaggcatgccaagaggctggccgtcgcccacagcgatatccgccccgtattctgccggggtcttcataacagccagggccatggggttacagtccatgatgtacttggcgccggcctcatggacgatgcggcccagggcgtccccgtcctctatattgccgtaatagttgggctgctgcacatagaagcaggcggcctgggggtctgccttcagcatctcttccagagctgccccatccgttaccccgtctttttccggaaccataacaacctttgtattgctgccaaagcagtatgtcttcatgacctcgataacgcccggatttgcagccgcagaaatataggctgtggttttctttctctccttacacatggcaatggcttccgccgcagccgtggcaccgtcgtatatggatgcattggaggcgtccattcctgtgagttcacagagcatggtctgatactcgaatatggactggaggatgccctggctgatttccgcctgataaggcgtataggcagtgacaaactcctcttttgacgtcacgtttgaaacaatggcaggtatatagtggttataagcccctgcccccctgaaaatatggcggaacacaacattcttaccggctatgtcctccattcttgccttaactgcctgctcgctgagtcctgaagggatattgaccccttccttcagcattacctcatccggtatatgggagaacatctcctcaaagctggcatatccaatctcacgaagcatctcctgctgctcctgcttcgtacctggtacataacttcccatataatctcacctcacctctcatgggatggaataccttccccgccttaatcccctaatccagggtcttcacatattcctcatactctgccgcgctcattaactgcgctgtgccggttacattctccaccttcatgaaccatgcctcataaggcgcctcgttgatggattccggggcgtctagcagtacctcgttgatctcggccactgtgccgcttaccggtgaatacacatcggatacagcctttacggattccacatctgcaaacggctctccctctgtcacctcgtcccctgcttccggcaggtttacgaataccagatccccaagagcgtcctgtgcataatcagacactcccactaaaaccgtgccgtcctccagggtctttacccactcatgtgactttgcatactttaaatcttctggaaaattcattcttaatacctccttgaacatgctgttctttattatattttaaaaacttgtttattatatcccataaattactgccgtttataaaatggcagcttcactacctccgcggccacgcggcgcccgcgcacatccacttccagcgctgtccccggatccttaaaccctatgtcaaccagggccatggctgccggatatcccaggaacgggcagtgtgtgccggaggtggtcatacccacctgctgttctcctatgtaaacaggctggtgctccctgatgatgccgcggccggttacctttaatcccacacgcttcctggtcaaaggtcccttgtcctggatagcctgttttccgatgaaatcatccttatccatcttcacaaagattcccaatccggcttccttgggagaaatagtatcgtccatctcatgtccgtacagaggcatgcctgcttccagcctcagggtatccctggcgcccaaaccacacggaatcaggccctcatcctttcctgcctccatgagcagttcccacatcttaggcgcatcctccggtgccagataaatctccactccgtcctctccggtataaccggttttggaaatgatgcatttcatgccgcccaccatgcggtcaaaaaggcaggtatagtatttttcaggaatatcttcctccttcgccacctttttaagcacatccattgcttttggtccctgcagggcaagctgtgccacctgggaggaaatatcatcaaacacaacatcccctgactggtgggccttcatccacgcatagtccttatccttgttggcagcgttcaccacgataaaatagcagtcatccctgaccttatacacaatcaggtcatccaccacgcctccctgttcattgcacatggggctgtatctggcctggccctccgccatgaccgtatagtcattggtcaggagcatgttcagattcttaagggcgtccggtcctttgcaaatcacttcccccatgtgtgacacgtcaaaaagaccgcatttggtacgcactgccatgtgttcctcgataacgcctgtttcgtactgtaccggcagaagataccctgcaaaaggtacgatcttgcccttatacgttacgtgagtgtcgtagagaggtgtttttaacaaaacctcccctgctgtttctgttcccataatcactacctccttcatgaaattgtctggtccttaacaatcatagactatgaaagcgcacgaacaaaagatgttcatgcgctctgtccttggacctgaaagatttggcttcttcggtgctatgctctccagagtatcgtccggtatccggtccttttgcctgagagttttccgcttccccttcggcgctgtgttctgtatgctgataatacacggatacgctgtatcaagcgtattctgtatctttcatacattttggtcagtctctcccgaatccatcttccgatgatataaaattgtccgcaaacgcaaatcccaccggcttgccttgtgctaatcccatactaacacaggcacgattttcagtcaatagctaaaaagtgtttaaattttaacacatcaatcgcatttttcgccttattttccaaacttattttcacgaatattttacggtttatttagaaaaaatactggtaatctcctatgaagtagtatataatgagcaaaggtgatgaggcgaaggggttcctttggcctcattcttgtatgagtacggttttaggtgagcaaaatcttaagtgaaagaaggtgacaagatgcataagtttatgcggacagtaggattcagtatgtaccagaaaaaacaggatatggcgaagcttttaaagcgtctggtaaaagaagcggagatgaccggccgcctggcggaacaggaaggcagcaggttctgtgaactgcgcacggaagtggcccccggcatgggagttgccatgataggcgagatgagccccaaaggaacattcagccgcgagtattactttccctatgtcaagaacccggatgtaagttcagaggcggaatgttccatccagcgccacacggagcgtgaaacttatgcaggccttcttgatgaatacagggtgggcatatccctaatcttctacatggaaaattccatggagtacaggatgcgccgcagcgcccgccagcctgtccagccaaagggagccgcccttacaggactggcagtccagggtaaggtgctgctgcctgtcaataagacggaaaaacaggcagaggactcccgtcaggccgccaaaaaacgcagcagtctcctggaagccgcaaaacacggcgatgaggacgccattgagacgctgaccatagaggacatcgacctctattccatggtatccagacggattgcccatgaagatgtgtactccatcatagagacatgtttcatgccctgcggcatagagtgcgaccagtactccgtcataggggaaatcacggaaatcagcaccagcgccaaccggattaccaaggaagaaatatataacctgaagctggactgcaacgatatggtattccatgtggccatcaacaaacaggacctgttaggcgagccacggataggacggcgctttaagggacaggtgtggatgcagggtacggtgctgttttaaagggatgtttcaacgggatgtttatttgaaaataggacttgattttttttaccacttaggttattatataaggcggaccgcatgagtatcatacggcccgccttatatttgtgtttctgtagctcagcaggatagagcgtccgcctcctaagggcttgttggagcaatcgcccaacactgaaaattttatacaagtccatgtacctcagtaggatagagggtccgcctcctaagcggaacgccgcaggttcgactcctgtcatggacgccagtaaacaacgctgtaagcctttgttttcaagggtttacagctttttttgttatcacggacagggaagcgaatgtatggctacttatgtccgtgggaatttccaaaagtcatttattttgcaagatagcttgctaacactcatttaaggtagatgatgatttcatggatttttacaatatttgctaacactttttggttagcaggtttttcctgtttggaacaaagccctttgctaacggttagaaaggttttcttttaagagcttttctttcatttccggtgtcatggattttagcaattcaagcagaagtttatcattgtcactaataggtttctgtgcttctgaatggggattgtgttctggttcctctgtatcaagggtgtcataaaattcttcatccagcttctttgcattaagccgtctgtcttcatccacgatttcagagtaaacatctgttaccatctccgcttcggcgtgacctgtatctccctgaacagatttaatatcaccatgcgtcattttgagcttatactttgtgcttaaatggcgtaggctgtgaaaaacaacagtttcaaaattgtgttcctcacatagcattgtaaatctgttccgaacaatgcggctttctacgggattcccattttcaagagcaataacgaggttataatcgttataggcacttcctaaaaactcttttaattcctgctggtctttcttgtattgaaccagtaattgagcaagcgttgtcggcagccatacggtacgattacttgtttctgttttgggtgtttttaacaccagccttgtagtacagtggggcttctgggttgggaaaattttaataatatctttttctttcagcttttgcatagctgattgagaaattcttgccagctccttattgacgataactcttgcattattatttgcaatagcttcttcatcaataatcacatcatcccaagtaagccccgtaatttcgcctactcttaatgagcaggcaaacgccaagtgcatacaaagcaggagtaaatcatcatccacaagtttgattgcttccttgaatgtctgtacattccaaaccttacgttttacctttggtactttaggcaaggtggctagggaagccggattccgcattttgctgtccagatattcccaacggatagcctgatttaaggcacagcggataatatcatggattttcttaatgttggcaggctgcacacagcgaccagtcgcttttcggttagcacgaggaacttctggaacactcaacaggccattgtaatattgagaaagttttttcgtggtgatttcatttaacttccaatctccaataagcggattgatatagttgttaatcgaactcaatttactgctgtaagtattggcagaccacttcgatacaccatatagattgacaaaagtaacaagaaattcctttaaagtgatttcatcatctggggtatctattgcttgctctgcttcctcacgctgatgggcgaattgttcttctaaagggacgagaacatatccataggtttgttgataaaattcaataaacgcttttcgtgcctttgcttcttttttggtttctagggtgtcccatttctgctttctttcgcctgtatcatccatataccagtaaataactgaaaattttgattttctttgtttgattgaagccatattatctctccttaaatgattattcgtgtaaccatttatcgaaagatattttagatactctaatcatcctgccagctctgatatagtgaaattgaccgcttttgactaaagcatatgccgacttcatgctgatgtttaaaagagctgctatttcctctaccgtatatgtctttttttcagacgttgtaataccgtgtgtattctctttaccatctaacataagattaaggctcctttctatgatggtaacagtaaaatacacctctctaacatcttgagtataacacaggaaattaaagttttgtagaggttcagtgcattttactgtgagcaagtcagccgaacagctttcgctaaagctcatgggaatctcacccctgcatggttctcatccagccgtaccctttgccagcggtgctacatcatcacacggactaaggctgtacggaagtatcattatcacgatagaaaggtcatggcagcagctctgcagtaagctgcttatggaacactggcaggaatcgctatccggtttcatccctcctttggtgggttacggcgtgccagcccaacggctctctttctatcgaaacgtattcggctgctttatgctgcgttgattagacgctttctttttcaaggaactatccggcttgtcagcctgttaaaatgcactgacagcaatacattttaatagactggcaggctctgtctgggaagcatgggcttgtccatgcttccacaggagagcgttatttttagtttgattccctgatttcaaaagataaaatttttgcaatcagacgtgtttccatccggcggcgtagggtttcatctacaaccatgtgggtatttccgtattcgtctttcataggacgcatggaacggcttgcaataaaaccgctataatggcgtacaatctggttgactgcttcaatatcgccgtccgcagcccttacaatcacaggaaacggaatcatagggtgctttgctgtcatgcttcttcctccataaattttttgataaattccagtccggcgtgtcttcttctctggatggtagaacggttgacttccagaatttttgaaatttccgtatcgtcaaatccaagaaaataatatctcaggataacatcacgtttcttttcgtccagatgttccaatgcttctgctaacaggctgttttcaatgcggacagtaaatccatccatttcaaaagtatggaaatgggatgggtatgtgtcttcggaagaaaacagattgacggtgtaatcatccatatcacagaacagggtttcccgtttacactgtctggataacactttgagatagtctttgcgttcatcctccatagcgaccttgcagatgtaatcaaactggttctctatggttgcctgaaattcagatggcttcatcattactcaccccctttcttgccttaaaagagggtagaagatttcttgacttccccctttcgtgcttagtcccgacacgaaagggctgtttgttgcattatctgttaaattttctaatttctaatgacacaacaaaaataataggtgcaaagccatctagcatatggcattttaaaacaattcaaaatggtatttgcatttataggcaaataaaaagagagcgcaaaaatgcactccctctttaaatataaataccgttcattctttaagccaatttaatatatgatatttctccgctagtgtaattataaataatcctactaaaattccagctatttgtaacataaaatcatcaatatcaatcacataattgggaaagccagtaatcaaattaataagcaactgaataggttcaataaatatacctgctaaaatactaataatgctgattttctttacagatgctctcaaaataatataaatcaatattggtataggcattgttaatactatatgtccggctatacttataaatcccaaatttttcaatgttttaaatgggatagtttgtaaagtcagccatgggctaatactatcaatgctttttcttataactgttggagaaaaatatataccaattaaaaaaacacagtagaaagcagtcagaatataacctatcatataaaaagtggattcgttttttttaacgaaagagtatattccaagtatgcctagaacaataaataacattataaatatctttaagtcaggaatctgtcttatatatgtccacataattaccttcctcgtctttataaaaagggatacaggtatcttccacctgcatccctaaaaatatcacctttctgttattcaggctttgcaatgtatattacaacttcttagaagttatagctaatatttaacgttcctgtcacacggtagccagtagcttctattaatcttaaataaattcgatatgttccacttccatctccagtaagtgttacagaccctccatcttttgcggatacgtaagcataatcagtagcagaccatttatttgtcactgctgattttttttccagtcctatatataaatctgaatcatcgccccctggatatccatagctctctatccatacattaatatcaaaagtaggtgtatctgaaactacccagttttgcttcgtataaatcccaccggtcatatcaaagtcacctcgatatgtaccgcttcctcttacatcggcgttaataattatcgcctcataatttggattgctgtcatcaacaaaatcaagatgtctcccatcggtggggaccatctgaactgaaaaagtatctgcatatgcacttataggtaaacaaaccattaaaaatattgaaataaaaatcgaaaatatcttttttatgaacataacttatcctccttccacatttttaatagacactgctctatttgtaattccccattggaatccacctcttttctctagccgctacctcaggaaacatactttcaatggcattatattgagactgtttattttaatatagttatgcttccggtaatatgtatactctttgacgtagtaccctccaagaatattttatagcttccagattgctcaattgaaaatgtatggtcaatccatccattagaagtctgaacatatattctcttgcctttggaatcctcaagtcccgccttaaaactgtcagaactactatctgattgtagtataaaagccactttattacctgaggtcaaagaaagactatctccatacttcacattttttccatcaattgttatatcaactgtcgttactccccttggatttatttgtatcgggtattctattacatcttccgaatagtgaaattccgtcttctcagataattctgtagattcctgctggacttcaacttccgtaatccaaagtttctttaccactaaatcctgtaaatttgacataccccaagaagcagcaaacactgtaaggggacacatcaaaaccattgacattaccaacacagcaaatgatattctctttgttttttcagtctttttcatgatatttctgattctcctttccaaaccgtttaccgtatggccggtaagcgacaccgtagttaaaccaagctctttttcctgtatttgtaaaattagttccgcatacatagtatgtcttttgatgggctggcgattaagtactttctcatcacaggccatttcatttacttcaacaaaataatctgatagtctgtaaataagcggattaaaccaatgcagagcgcataaaataaatacaagtctgcgaaaaaaataatcctgatttttgcagtgaaccaactcatgctttaacagcaacccccattcttcctgcgtgtagttattctccggcaagaaaattttctgttcaaatattcctgtcataaaaggagactgaattatttcattcgataataacaacaccggacccttcagacctaattcattcattgcctctctttttgtctctaatagaagtttatcctgagtatacttactgcatttttctagttttttgagaatccttctgtcatttgcatatttgaagataccataatagataaatcctaaaaaccaggcgagaaaaagcaacagagatatccagtgatttccccaaggtgttccgtagctaattgaacttttgtgaatggtatccatataaagcaaatcatcactgaccaaataaattctttccccaaaaacgaatttatacaaaattacaccagccaataccggcataccaaaggcactgaatactagaaccattttaaaaaacaaacttaaatgctccatgtccattcttctttccagatgttttccggaaagggatataaccgatattaaaatattcaatgagacaaatagcgttactaacagtgccaaaatgtcacttatcttccagctcatcttccagctcctttaaaagatttctggttttttctatctgtgcttttgacaatgtcttcccacagaaggcagcaactaggcgttcaaaagaagtattacccaataccccctcaatctgttggcgaagtaatgcctgctcatattcttcctgtgtgactaaaaccgtatagaaatgatggagtccactttgctttttatcaacgtagcccttttcagaaagatgatacaaaatcgtactttttgtacctcttgcttgtggaaatgcctgatagatttcctcactactgacaccttctggatgtttccaaataaatttcataaattcaaactctgtagcagaaagttttttctttccacccagataatttaaaggtgcttcagcaggtcttgccataaatacccctcctttctgtatatttgttaatataattatatttatataataccatatatttgtgtttttgttaatacataatctgttcataatattaaaaatctttggactgcatattaatccattaatcttatctcttttgtgattccatacttttatagtaatatgaagacgaaaaaggggagaagcctttagataaggaatctcgatgtttcagcggcaaaagctaatgtactaatcatatatcaaacgtctgcaaaactgtttttatacttttacaaatgtcttattcctcaaaaaaattattccgtaaaagtatacttttacggaataattttttggtggatagtgcttcttctataacctatttaatcatccacactgccagacccatgcagaaattcattcctagggaaattttcagtagccaatttaatatacattgaattaccaggaatagtaaagtttgccccacccttcacatcatctgcatatccccggaaactccctacagcatttccgtcagacattacagtcagaatataactataattatcattggtgcctgtagactggctcttagaataataaacgtcagactgggaatctacccatacagtactatgaacattccagtaagcgcttggggtagtgccacttgtctggatattgtagtagaaactgcctgtagagctaatcccctctattatacctgtattgggatatattcttgctaaatcgggttcggattcagaactatttgctattgtcctggccattattctatcctgttttaccccttctaccgcttctgcttcactatggtaaatagaaccatttatcagttcaccattttcatagttaccatccaaaagataatcatcctcggataacgtctctgcatttccccgtgtttcaacctcgtactgaacggctggaaggctatccaacagtgatacttcctctgccattgagctaaaagataatgctgaggttgtcgataataccaaaattaatgctagaattttttttgatttcataatattcccctttcttaatatggttcaaaatgacttaacgttaagattaactctattattctaccaaaaaggatataatcaatatatacttttatatttccaatcaattctatatttattttctacagattatccaatacttattttcccgccaattttatttgaccattggcagcacctcctttactttaacgctaaagtgtgtttcattgaccctgtccaaaaatgtgatgacacatattatactttatgtagaaatcatataaaaaaattctttcttttcacttgaatgtgtaatatcgcaggcggaagaaacaacattttatattttcaactactcttctgatttaaccgtggtatattcgtggtaaaatgagtgtttttctatacctcagaatatttgaaagtatagtatttattcggataatcggaaatcagacataaaatttaattggaaaaaatacacattctatgcaacggtatactgttattataaatatttctttcccttttcatccaatggttataaaccataaaaatgaccaaacagattgattcaactccaccactcctcattaggaactgtatcattccaaaaaccttctacataccaactatttgtcaagtctttttttaagtatatatatttttcatttataccttgaagcaaaccgctatttggtgatgaatcagaggatatgatatatactttaaaacaggctttatcattcgtagtctttatttcttcactacttgcagttaattgcagagcattccactctttttgtaattcttccgaatattctataccttcagataatgcacaaataccggcatattcaccataatttatcatagtacaataagagaatattaacgatgaggccgactctgccccctcattaacgaattgttcataaaaaaaatcgtcttgtcttgaaagttccggcatagtacaattcttgtcgctgaatagtacccactccttgtcgtctctaatatatgatattcctgtaattttttcatttctaacattcaatatgccataactcccgtcagcaaataaaactgattttttactacaacgatacggctttacagatagttgctcaggtgggatgtcttttgttaaaacaaagtcttcaaatatgtctttttcagaaatatcgtttgttaagtttaagtttctggatatacggtcatattcatatagaagctcagaggatgcagaccatatccatatagtgtcagcatttggactgactgatatcttacaggaagaatcattactaaaatcatatcctaatgcctgtaagtcaatactatcctctatttcaccagtggtcagattataaataaataacccaaaataatcatgcattataataatgttgtcatccgcaaagtctaaaaccggcatatcggttgcaatctttgtatttacagaccacttggcaggagtggcctgcatattaaaacttggcggtgattctgatgtatgtacctcagtttttcccgtactatttattgctgccgctatttgctcctgtttaagttttccagagtttgaacatccaacaacaatcgtactgaaagccaatggtataattgtaaaagttacaaatcttggcatttttgtaataaacaatcaaatctcctccttgtattaaactccatcaataatgatagaaatataatatatttaaataatataattatatttgtataataccacatattttgctattgtcaatatttaatcatttatcagccttgacttatttaacaatcttccaattctccccattcttctctagaacaaggtcaaactgtgatatctgtgttgtcatagtctgattatccagatatttcaccgcaagggaagctgtcacctgattcccttttcggttgtaaaccggattcaccagttccgagaagatatattctttccccacaggtttcagcacgccctcattcacataataggtcagctcctttgcggttgccgtagggtacagcttgaaaaaggtagtgagaaattcgttgatttcctccgtagtgatggaatccaccgtaccgtcactttgtactgcttttggagtgtagccggattttacgggaacgctggtgatggtaggattctgaacaatcgtcaggtttccagagccatccacatagactgtcacctgataagcggaacggacggttttactggattccccctctgtgatacgctgttctaccgtataggtcacttgataatgctgctccttttcttctatgatttcccatatctgaaagtcagtcagggcagacgatacggggatgtcctttcggacggtatctacattcagggcttgcagttctccggtgagatacccttttaaagcatttgtccggttatcaatggaagcggcggactgttcccatgaatagtagacttctgcgaaattctccacaaagttttctatcttgtgggtgtcaatgattttttcctcaatcactttggtttcatggacagtgtggatgtctatcgccgtgaaattcttatagacggcaaacaggaaactcaccgccagaagcacccacagggcaatcacggtttttttgtgggtattgactttgtaaactttcagcttcttttctttctgctttttctggttttcctcttttctaatctgaatcatatcggttcatcctttctattgtttgattcgtccggctccggcaaggtgctgttgccagtaggagcctgtcaggtctgcataaccaatgggatttccggcatggtacatccggttatttcccacatatagccccacatgggtgatataggttccggcgttataggtggagtggaaaaagaccaaatcccctgcttttgcttcggacagagggatgtgctgtgttacattgtactgttcctgtgctgtccgtggcagggcgattcctgccttgccatagcaccactgcaccagtcccgaacagtcaaaggaagtggagggggaatcgcccccgtacacatacgtccagccctcatattttaaggcttcctccatgatagcctgcaccgtttcatcatcaaactgtgccacggtcaggtattgcgatactaaaaggacgtaaaacatatttccgtaggaataccgccagcccccgtttttttctacggcaacagggttggtgtaggtgactttctttccgccggatttgtcccttgcgaagctctctgccagttcaaaggtgtacttttttccgtgtcctgccacatagtctaggaaaccgccaccgtaattgtaggactgaatcacactgtttaagtcgcagccctttgtttctgccgctgcgagcagttccgagaaatatttgcagccctgtttgatggattcctctgtgctaagggagttcgggggaagccccagagattccgaggactgcataacgtcttccagtgtgccgccggattccacctgaatgatggcgagcagcacatttaagtattcctctatgccatattcccttgcatacttttccagcataggtttatgggtgaggacttcctgtgatacgctcacgcccccatagataaggtttccgccgcttccgccgtcttcctcatccgagaagacaatcaccaccaagaggagcatggagaacatcatcacgaacacgccggaacaggcaaagaaaaggtgtcttaacttcatggtttctcccctttcttttgtttggcagccgcttttcccgtttttgtccactcctttctggcggtggtacgccggatggtaaagttcgattccttaaccacaggggcagcccgttttctttccggtatcacaggagccgtatcattctggacaggtcttgccggacggggagcagcaggtgtggtggttggagctgtcttttgtctttcatctggctggacaggggaagccggtgggactatctggcgttctgcccttacaggcggtgtatgttcatagtggatggaagcagcttttaccaccggaaccgaagcccgttctgccacagtcccctcataagaaacctgtccccgttccctgatggatgggggagctggctgtatagctggctttcctgcatgagcggtatctgcatgatttcggaaattttccggctgctttgtagtaacagggcgttcatggacaggagccgcccctttgggtgcttcggaagcagtcttttgcggctgttttgcctgttccagttccgccctgcgttctgcaatggtctgtctgcggctttctgcctgtacgttccgctgttcggctctggcagtttgggtctgggtcacgctggaagtaaaatcctgtactccctctgatacctgtgttttcccgtggtaaagggcgtactttgcattgacaggcaaatcttttgcctgctcccgaagctgtccggcagtatcggctatcttatctttggtatctgccactgcacccaccgcagagccagccagtttccatgcagattccttttccagtgctgtctgtccgtctggtctgctgtggtctgcctgtgtccgtttggaggaaccggagttggaagcatttttctggtctgaaccagcctgtttccctgcgtggtatgcagccgtttcagccccaagagctgtcacagaacgtcctaacttatgctgtaaacggtgcatatgggcgtgcatgagcatacggggtcttcgcatgatacggcttcccatgctttgggaatcaccgctttgtaaggagaacatccccatcaaatcccccaacttgaaataaattccggcaaaggtcactatctgcaagaacgccgtcaggaagaacggatattccccagacaggttgtagagcatggtggaaatactgaacgctaccgtgataatcagggtgattccggctctggtaaggatggtattgaacagtttcgtgatggcacgttttgacatcccctcaaaagagggaaccatgctaaggagaaagctcacaggcaggaacatggcgtagatgataaaaagcacctgtgagaaaatcattatccccgtgagcaggaatacaaaaacggagataccgatattgaacatgaacaggaagaagacagttcccaatcggttgatggtctttgtgatggtaaggttcgtgttttccctgtcttcgatttcctccaccacgatttcttccctgtcctgcccgttgttttcgtctggactggttgaaagcaggctttccacacggtctgttccaatgctttccacatccgagttgccatattgcagcaggagccacggctgcttgacctgaatggaaaacaggctgtcccgtatcaaatccacactatcttttccctgactttccgagttgggcagcacaatctttgtgccaagggtcaggctggcattgctgatgtctgcagaaaattcattgattttcccgatataatcaggagcgtaggcgataaaggcagcggacagcacgaacactaccacaaaattgacaacggcatggatggcttttgtagtttcccgtttgataagccctgtgtaggcaacgtaaatccccaccaccagaatgagaatcagcaggaacccgatataaaatccctccgaggacaagccgcctgtggtaacgcctgcaagggtctgcatatttttcccgatggaatccgccgtggaggaaatgaagtccagcgagtaggcttcctgaatcagataccctgtggcgttggaaaggtacaggctgatggtccagataaaatttgtgatggcatacagcccgtacattacctgttttccgataccgtccagccagttccacgggagccagtcccatccgctgtccacataaaaatcaagctggtagttgtccagaggatatttgctgtattcgttggcagcgtccaccgtatcatccaccagtccggcagcgtgggcggcagtaccgaagactgccagcagcaggaggatgagcaggagtgccagcagcacttttcctgctatactcccgattttttttaaagagttttgtccctttatccggcaagggacaagggctgtcccctgctggatgggctttcttatcttcattcctccacctcttttcttacgggcggtctggtgtcaaaggcatggaacaggtcttcaaagatagggtggaactgtatcactcctacacgcccgtacaaatcactgataaggcactgtccgttttctaagtcacggagccgtttctggttgttttcatcttcggaatccaccccgaaaaaggtgagggtctttttgatttcgttgatgtccgtggaacggaacgcatacttcaagcccagattgtttttcagtttttcatccagcaaatcgtccgtgttctgggtcacaaagtaaacgcctgcgttcatggcacgtccggcacggaccagcttcatagagagggtcttgccctgtgccacctgtaagaagctccatgcttcatccaaatccacaatcttaaacacgctgcggtcggtatggatgaagtcgagggcaaaggtactgataacaatgagcattgccacggaaagcagctccattgtggtgtattcttcaaaggtcgtttccttatccggcagcaccaaatccgccacctgaatgatgttgagctgcttttcaaggctgatggactgtgtgacatcctcatccgaaaagagcagatgtgcaaagtcatagtccgtaaaggattcaatatggtctgctatgctggtgctgatggtggttccctccgcccgtagttcctcaatcacctttaaaagcccccgctcctcactgtttgttaccgcacggatggctttccgaaggacggggaacttctccccgtcacggctggaaatgcctgttaaaaaggtcaggatgtcgattgccagtgattcggaatcctttgggttctccataatcacataagggtcaagcaggcccctgttctgttcctccgaggtcaggtttacgatattgatttcatgggcgatttccggcagggtttccttccagcgtccccgttccgctttcgggtcaacaatgagtgcctgtgccccaaacaatacacagtagtagacaatcatgttgttactgaatgattttccaccgccgagggagccgacaaaagcggcagcaagggcattggtgacagagcctttcacaccctgactggcaagggcaggctttaagtacacgtttcttcccgtatcaaggctatacccgatataaatgccctccggttcccccaacatctgggttgcaccaaagcctagacccgcgaggaagtcactggtgacatactggatgtaatcgttcatataccgtttgctggcagggagaaattccccatgcagccccagcatatccccaaaggggcggaccagcttcacgttcaaatcgtcataaaaatcttttacctcattgcaacggcgtttcagttcttccaagtcgggagccgtcacacgcaccacataggacagcttgtacatggattccttgctctggtctaaggtggattccagctcatttacgctgtctaaagcgtccaccacatttgtgctggtttcactgtcattctgccatgcgtggttgtccaaatctttcaactcttttttcttgttccgtaccgtggagagggctttccggtttgtcacaatctctacattcatagaggtatcaatgggaaaagtaaattgctgctgttgatagtaaaagatttccgaggatggaaagtccaattcccccacaatgctgttgatggtgaagtaggcggcatataccgttccgtcttcctgttcgattttcagataccgctggttttcctctatcagacaacgggtgggtttgataaggtcatagtattttaccagcgtttcctcctgaaaccgcttcttcggcaggtaatactcataatcttcataggcggttccggtctgtccgtataaatgctcaatcagatagccaaaatcgtccttatcaagccgccggactttaaagcggcgtgaaattttactttccaacagtttttccatcttctgaaaccgccagatttcctcattgctcatggaaacaaaatcctccatgagtttgtggttgacttcatggaggaagtcggaaacagcggtctttgcttccctgcggaactgttttatggtgacttcctgctcattgacaagcagcttaaaaccgataaaaaagcggtagtccacctgattttcccctatcatggaaatcagggcttcggtctgtgcgtcaatctttgcacaggcaacgtcctttaacttgcccgtcacttcctgtttggagcgttcctgtgccgcccgtatgctggattcagtgctgatttgcagggcgtgaatctttccatccctgttctgggcgataagctgacggaacgaatcatgtacctgatatttctgctcagggcttaaaaaggaatagttgtagggaagcagctcatagtaagcgaaacactccccgtcatggttgaacacaaggttattttcgatatacttaatcggatatgccataaatatcactccttactgccgtgatgggctgtgccggatattccttttccagcttcacgggctttcctgcatacgtcagtttcgggcgtaccagatatgccagtacggatttcaggaagccgtaaggctttttcccgtcaaaggtcttctggcacatgaaccaagtgagggcaaagggtacgccgaagtatttcaaaaatgccccgtcaatgaacgaaagaggagggaagttcccaaagagcataaccgcaaacattgacaccacgaaccacgccatctgtgtgaacgtgataggaaatggcagcttaaaatcattgatggaatagagtaccttttccaccgaccagatactggtatagcttcgtatttttttcatgttgtctgtcctttctaaaagatggggcagcaaaagagccgcccctgaatcaaaaaagccgcctgtatttcctgaaagagatacagacgggtctaacgtaagatttcatatacgccgtggttcgtgacgataaaagttccatccaattccatgtcacgcccataggcttcatagtcgatatagttttgtaagtgtgccggaagttctccaagctgtccgctttcttccagatagtagcgtgctacgtccgccatatcgtcacagccggaatggcagataatatcgtcttcatgctcacagagttcttcgatactgccaaaataggattgcagctctgatagttcctcctgaatgtattccggtaagtcctccaccatttcacacaggcggttgatttcctcaatgggggtatattcgtcaatctcaaatggcagctcataatcatggatggcgtattcctcatattcatcattcaaaccgatacgctctttgacttcctcaaagtccacaggtggcgtgaaccatgcccccactaattcgccctcattgtattttcctaagttggcaatgtaaatccgcatttcttccacagtgtcacctccattctctgccatgcttcttttggggagttacactccccaagcccctagtggacttccgccatgaagcaatcagagcttgctccataacggaagtgtgatatgtttttttctatgcaccgataatcttattgaacagttccagtaagatgtcctttacaccatccgcattgaagacaagaccaaccgctataagggacaccaccagaaaaccgataagtttggaaaattccctcttaaatccgaggtacagtccaatcaccacgattgccagcagcacaagggactgggcgttggataaaaaccagttgtaaagattctgtccgaaattcataaaagctcctttctttcctgtaagagttcttaggttccaagattgccgccgttaaagcaccacctcctttgcagcggcggcttgctgcttcaggattttttcgtgcttctctgtcagctttgcatgggtgatgatgtcatggacaatttgggtgtggttcatcttatccagacggagagccagctttaatgtaggagctacctgatgggagagccagtgcagggtgcgttcaaaggaatagggttccggtttggttgtcagtttcaggcttcccctgtgttcccctataaaccacgcccattcctcactgatacgccagtcagaacggggcttcgtatcgtccctgtccacgaaccggacatagcggttgatgatttgaaaggctgtccgttctggattgtcatgttctaacaggtcacggatggcgtaaaaggcacgctcatttttcagccggatttcaaagcggttctttacctctgcgtacgcaatgggaatatcatgctttttgtattgctcatagtccttttcgtaaatgcagaagtacacctcactttggagggagccgatatacagggtgttccccatacattctttttcctcacgccgtaccagttcgccgctgcggtagcttttgaagctgcggaagaccgagatacattcctcattccggcacttctctgtcagatggggaatgtttaggattcccgttttatcattgatagcaaggtcaagtcgcttcattacgccgtcctccatgagaacatccataaaaaattcataccagctccgttcctgtgccagcagatagctttcaaactggcggcagccacgccctttcagttccagcagcacccctttttccagttccggcgataccagaacgaaaatatcacccagatagtaatgctccgtgtaagagtagaatccgtagtcttcatggataaagtaaggcagctttagccgcagtacgtcttccacgatatgcttcacatccgtagtggggaagcgaatccgcacatagtcaaagagcatttcaaggggagcgtctggattgaagcgttccagagcttccgtgatggcttcctgtaatgctttggatgggtgagccttgcccgtttcaatatcgctcaggtacggacgggtgattccggcagctaacgcaagtttctgttgtgagataccgtaagctgcccgtttctccctgatgtcccgtacccatgtttcttcattcagtgaaaatccctcctgtctaaaaaagcgtatgccaactttcagagccttgttgacatacgccggatatggggaaaatcccttgtgtaccgtgggattctgccctgttgtttggttgttgcctgtcgatttgtacccctctgttagatacgaggggttcctgctggcgtgccttgcggcacaccagccacagcaggtcagtccgtttctgcggctttcgcttcgcacgccgcctgcactccctgcctgctgtctatgagcttttttatttctttgaggaaatcgtgtccttttggcacaaggggcgtgtaaaactctgagataacgctggttcccacatccacatagccacgcccttttatctgctttaggaagaaatcctttgtggtttccccgaacatcatcccatagcccatttccgacatccgccccagagccacacggaaattgaactggtcacggattccgtcccccagatactttgcgtccggacgctggcaggcgagaatcaggaaaaatccagcctgccgcccaagcataacgatttgttttaacttatttaggacagcagcgttttcctttgtgccgagcatttccataaatgccacatattcatcaaagataaggaaatttgccggaagcccaaggtaagcgtagttttcccctgtccggtaattgtccatgagcttcatgtcttcgctgcgtttcatcatttcttcgtagaaacggtcaatgcaggcgagcatatcttcctttttgtagtacacatccggcataactgcctgtaagtccgcaaggtcggcgttttttgggtctaacacggacaggacggcgttggtgcggagcagggcttcaataagggtcaggatgaagtaggtctttccgccgccggttcctccggcaatgagcatatgggggagcttgtcatagtcccaccagacattttccatgagccggagcctgccgtcctttgcctgtacgtcctcaatggagatacggctggcaatggtatcatagagcagggtgtactccacataggaatcctttaattccttatccgtcagctcacagtacaagccgctttccagctttttctccaagtttaagagctgttcctgatatttccccaaggtgatttccacacggatatggagcaagccctgtttcatccggtagtagattttgggaaagtaagtgatggtttctttggaacggctggaagacaagtccttgaaaaaagcgtcatcctttctctgttcggattcataccacttgttttctaacaccatccttgccagcttttggcggtggatgagctgctttacttcgtccctgcggtatcgccagaacagaagaattactgcaagacacaccagccctgccacgcccatgctgaataacaggtaagggatatttacatcctgtgctatctgtgagagggacacttcctgccagttggttccggctatttgccggatatgaaacagcaggacaaccagcaggaagacagggaacagggcggcaagggcagtatggaacacaaggtctttatccgtgggacggatacgttttccacggaggaaaagctgcttcatgggacaatcctcctttcgctttcttttatgttcctgttattttacagggggagcgtctttcttcggcagctgcggattcatggcagccccttttttcaggacaatatcatctgccttgatgtaccagtccacttctgccccttgaaaggtagccgttgccacggtgtctgccacaggatggatgatttccacctctgcgttgtaatcaaattcctttaacggcacgctggcagggatggaaacctgaatcatacgcccctgtcctctggattttaagtcataggtacgttccttgatttcttctgataccgaaccatcttcattctggaggtgaacctcacggcggagggcagaaaatttcaatgccccgaatgttgcttccttgtcaatcacgattccgtttgctaatctcatagtctgatgtcctccttttccttacgcttttaccatatcgtcagcgtgcaaaatgtagttggtaaagccccgtgtgccgattttatagccctctgcggtgatacggggattgacgagcttcacacgttcctcaaagtcaaaatgtttctctccggcttcggcagggaggataaccacaatatcatccgccctctgtacgtctgaatacaggttgaagctacgggagagtaccgccatgcgtccgttgattctacgctgttctgttttgtcttctccggcaaactccaagttgccgaatgtcttttccatgttggggataacgaattttaattccatatagatgtacctgtcctttctgaatgttgtgtttgatggttagttttgggttctggtttgaaagccggaggggaacgctccggcggtggtggtttcttcgtagtatcacgtcctttctggttttggggtaaaaaaatagacgctcagttttgaacgtctataagggaaatacttattaactttttagtcttctgctggatgttttgaaagataacgggaataatctgtgtcaaattgtaaagatttcaactgttcatctataatttgtaataggtttttatcgttaaggattgcttcaaattcttttatagagaaatcaataatgcaatatttatcttccaatttctccttatggagataaaatttttttattagtccagcaccattactccatccggttccgctagtaccataatacgaaaataaaatgcctatttttatgttggttgtcaaaagcaaactacaaaattttcctatgtatgtaacactaacggctttgtcgtaatttttacattctcctaaaaaggtatcgagttttaggtcaatcagatgatatgtcaacaaaactttcccttgaggagttaaagtaacgatttggtctatttcattcgttgaagttcgtaagtttctatctacattaaaaatatttccagagatagttaagagataagaaactaaattttctaaagcttctccctttaagttatgtaaatttttaggtgcattgtctgtaggggaactgtcatgaagctgtttgaatttttcaagtaattctttataaatgtttttttgagcttcactaatttcacaaattttttcgtatcttaatttatcagatatactattaaggacatttaatgccttagaaatttctttatcatctggcataatatcaatcatcacgtaccaccatatatattaaaaatgaattttctattgaggaaagttcgctatggcagagttcacattcaaaagtttcaggtaactcattaaacaaacgtactgtccccatagatttttggcaattactacaatataattcataataactttgcaaaattccttgcttttccaattcagataaaaaatcatagatttcaggaatagataaggaaaattttcttttcaaaacgccaggataaatccacatattttttctataattcttgaaaaaattagttaaggcaatgctatctatatttttattcattttgtgttgtatcgtcatttctatgattgacaatgtattcgataacataattcattcgctccattccaattagcacattactatagtaatattgtattaaacaataagatttattcatgtaattaaagacaaacttaacacggttacttcgtgtttttatttcattttcccataacaattcaatccaaggataatcggacatttcttccatttcaaacataaattgttctaaggcttctctgaaatcaggtactttttctaattctgcctgattgtcatttaatagtgagcgtagttctccgataaatggtaatatatattcttgattgttgccgacatccagttgtgcgtttccaccattaggtaatttcatggattgagcaataagttttacattttcatcacgtttgcatacattaaccataaagtctaaatttagcggaatcaaatcgcactcaaaatgttctttaaaataatcagacatttccgcaattaagttggaatatatagtcggttcttttttgtcggataaaaagaccctttttaaaacatcaaaacgaaattctatcaattctcctttttcatgaaatacaactaaaaagggatatttagttaaaaattcttcctgtgtgagaggatgaatagctgcatatgccaaattaaatttcaaaaaatagtatccatccatagagtatgcaacaggttttacgaaagatgtatataagtaatcattttcataagtgttttcaagaggaatgatttcctttgctttttttaacgttgatgaaaaatcgtcgcaggtaaaaataacggaatacttataatcttttaaaaactcccatttttctaaagcatatccagctcttttgctttggtgaatgcaggttacaagctgttcggataatgttttttctgaaatatctacagtttctagcccctctatgtataactgtcccgaagtatctgtttgtttagtcgcaattccgtgctgaatgaattgttttactaaatggcgttttactttatctgaataagccattactgttttttcaagatattctaaatagttgtttaactgcatacaatccctcttttctgtgcatatatctttcgttatcctgattatacttgatataagtgcaaaaagccatgcacaaatcaaaatttttataggattttcgatatatacataataataaaagttttggtgctattgcatatataaatcgagtaggaggaaggcgattatttcgccttccgacctctcacaccaccgtacgtaccgttcggtatacggcggttcaatcaacttaacatgtaacagccttttcggcgtagtagtcttccatggatacaagaccaaacttagctagtctctctttactgatacaaatgtggagattccagcttctgcacactctggcatatcctttggcatatgaaatgccatgtgccgcatttggcggcagaccaagtttgataagattcttttccctgttctttggcgttttccagtgtttccatatgcacatgcgcagtcgataccgaatctgtccgtccatttttgcgcacagccttttcatgcttccgattttgaaataatttatccaccctcggataagccggttgagtttcccaattttataaccattgcccactccccagctcctgcttgtatatttcttcatctgcgccttgaactttgctgccgctttcgggtgtggtctggctttgtaccctttggcaaatgagtcatagtaaaatccaaaccccagatacttaatgccctttggtttatcaaccctgctcttttccgcgttcactttcagtccaagcttttcctctataaaccgagccacgctcttcattacccgctctgccgcctgtctgctcccgaccattataataaggtcatctgcataccggacgaaatccagcctccttgcttccagttctttgtccagctcatttaacatgatatttgctaacagcggcgagatatttccaccctgcggtgtgccgactaccgtatcttcatactcatcatcaatcattacgccgctgaccagaatctttcttaccaccgatatgacatctccgtcctttattgtccgtccgaaaatcgtcatcagcttgtcatggtctactgtgtcaaagaatttcgctaggtcgatatccactatccagttgtgtccgtcattcatcatttccaatgctttaaggactgcctgctgtgcacaccgcttgggtctgaatccatagctgtggtcgtgaaactgctcctcaaatatcggggtaagcacctgtgccaccgcctgctgtacaaagcggtctactgctgttggcactccaagatttcttgtaccaccatcgggtttgggtatctccaccctgcggactggcttcggcttatacttcctcgtccgcaactgttccttaatgttttcgccgttttccgaaagatatgcgccaagttcttcaacggtcatcccgtccacgcctgccgctcctttattccttacgacttgcagatacgccgcatttagattatccctgcttaatatctgctccatgagactgcttgtgtccatgcgttgtttcctttctgccccttttgcctttgccgcctttgaagtcatcgacaggcgtatgctccggctacgaagtggaacgtacttcaactgattgattgttcagcccttcgctccgtccccattacaggaacttcctcactactatggcttctgctgacttctcacaattcgttgttactacggctaatgagaccgcctgtgagacctccccagttaaggtgcgtgttcttttcctccatgtacctgccgcatttactcgtacttccggcaaccttttggacttcagtgccttttgccaccttatccgtatttccgagccttatatgcggttcctgtccgtcaggtcagaggtttgcttacagcttctttcagattccgtctcacggcggacacccttgctgttcggctatgtgcttcgttgttgcctacgcgcacttgggactttcacccattagaaaacgcccatgctgggcaaacaaaatagacgtttcatgttttcacacaaaacgtctattccttgcattatggaaaagagtatcgtataatcttgataaatggtttcctagctggaactgagccagctaacacgttgctaacacttttgttaccagtacaggacatttcgtgaatctatcttccgcacagacctcacgcttttcctgtattataaggtgttagagggtattacaggaggttagaaactacttgctgcaaaaggacctttagaactcctaagcggaaggccagcggttcgaatccgctcaggaacactggatacagagccgaaagcctggttttactgggttttcggcttttttgtttttgtcgaacgattagcatctttttatcagccacattccccgcggttccttatacttaaattatacaggaagctattttgcaagtcttttcgtgtaccgaaccatcatgtatatcacaaaaactgcaatcacaatctctgttaccggcatagaaaaccaaataaaatcagccttggccaccgttggcagcagcataatcagcgctccgctaatcaccagcccgcggccaacggaaacaacaaacgacgcagccggcttcatcagggattgaaaataataagttgaaaatatattaagcgggagcagcagaaacgaaataccataacaccgcatgatggaaggagctatctgcagcacctcttctgtcggtttcataaaaatacggacaaaaccatttggaaccagcaccaccaatgttgtccagaagatcccaaaaaaggctaccgtacccaaagcatactttagtgtttctttcatacgcccccagtgttctgccccgtaattaatggaaaaaataggctgggaagcctgccccacactgtatgcgcagcactggacaaacatactgatattcacgatcagaccataaacggatagggcgtctgttcccagataccggacaatttgccggttaaacagcattgtcatgattcccactgccaagtcaacaaaaaatgttgaaaatcctgttgtcaagatgccctttactttaataaataaatagtgaatactcacaaatttaagtgtgcagcgttttgagaaaaagtgagtcagcataatcagcagcgtaatacacgcgcccgccgcggttgcaaggccagcccccaaaatccccatgtccatggcaaagacaaagaaatagtcaccaaaaacattaaaaataccaccgccaaggaccgccgcggttgcaaggccgggtgcgttgtcattccgaagaaacgccgccagcatctggttgaaaacaaagacaggaataacgatcttaatcgggaacaaataggcttttgtcaatggcagaagtgtttgttccgcgccaaacagccgaagcaaaggctctccaaagaaaacaataccagtccaagcaatcgcggcaagggcggctgtgcccaggagcgccgtggaaaaaaactcgttatagcagccattttcccgccgtcctttttctgaactataaaggacagatccgccgattcccataaacagccccagactgtaaataatgttaaagattggcattacaacagacatggccgctgttcctgacggcccgtgatattggccgaccatagccatatccacaagtccataaacagaagatatacacgcgctgccaaaagcagcgccaagatatttcaggtagagcggcttaatttttccagttaacaaattcatttatgtttcctcctttaagcataaaaatagccggataagagaccgaacatagacagttttcttatccggctgtgccatacgtgaccgcagccctccgaaaaaaccactatatccgacatcttatccggccttatactacgattataagtcctccgatgaacatgaggtatgataccttatataaaagaaaatgtcaatcgggtttttaaatcttaaaaaatccagaccttgggcatggacggaagcgaaaaaaagataaccaatatggtagaggccgctgccgctaaggttgtcgccgcaataagcgagggagaatgacatcctgttactgctgcatcgtataacggcctccccaactgcctttcttttgcggctgatataaatataccatattggcctgatccattgccggaacaatcataattgcatccatgaattgaccttgctcccggctttttttgctttttaccgtaccccttcggcatatcagacatatattatcataaaagcattaaccgaggaccattgtatatgaataacaataatccctactctgtaccatcacttaagatgacccaggtagaagacccgattgatccaggtttcacatatcctgataccgatgtagtaattccatctcctgacgatgaaatcgaccctgatttttccgttatgccaccctactacccggactaccctgtacgtccggactatcctgtacgccctaattatcctgtacgccctaattatcctgtacggcccaattatcccatcccctgcgtgttctgcaacaataaccagtggattcgcggcggaatacgcctgctaaacgccgccaccggatataacccatttaccgtgtatatagataaccaggctgttttctccggactggatttttctgaagtgacccagtaccgccagctgtcccagggctatcatacattctccattatgggctccaacggttacgtatatctccgcaaatccatgtatgtgggtgacggaatggccaccatcgccattgtcaactcctccacgggcctggacctggtatccatccgtgatacggcatgccccacggactggacctcttcctgcttccgggtctgcaatttagcctattacagcggaccagtcaatgcctccctgggcaatatctattttaactcagtaaactttgccgatgcagccagcttcagccggctcagctccggtaactataccctgcgtgtggcccgctccgcccgcccggaaaacaccctggttaccacgccggtaacattaaatccatcccggatttataccctgtatgtgttaaactggaatccctccgcggataccattcagacacttctggtagaagaccggagaagttagtcagtaatcatgagggagcagcataaattaatgcggctccctccttattttcctcttatttaccaccttaatttcggatgaaagcctgtgtttacggctctgtttgtgataaaatagtacaggacacagagccatacagaaaggaaaacctgccaatgatacgctatggaaccataggaaccaactttatcgtggaccgtttccaggaagccgcaatggaaaatcccagccttcattacagtgctgtctattccagaaatcaggaaacagccggaaacttcgcagcaaaatacggggttgaaacaacatacacggatctgaatgcctttgcctgcgctgatgacctggacgctgtctatattgccagcccaaacagcttccactatgaacaggccgcacttttattatcccatggaaagcatgttctgtgcgaaaagcctattacctccaatgccagggaactggaacacctgattcagctggccggccaaaacaacgtgattttattggaagccatccgcagcatctttacgcccggctaccaggccctggcaaaacatcttcccaaactgggaaccatccgcagggccagcttccatttctgccagtattcttcgcgctatgacaagttcaaatccggaattgtggaaaacgcatttaaccccatcttttccaacggtgcgcttatggatataggcgtttactgcgtacatcctcttgtgcgcctgtttggaatgccggaaaaaatcaaaacagacgccgtcctcctggaaaacggcattgacggatccgggacaatccttggcgtgtacaaggatatgcaggctgaactggtgtattccaaaatcagcagcagccgtattcccagccagattcagggtgaaaacggcaccattaccatcgaaggaatcgaccacccccaccagcttattttttatgacagagcaggcggcagacaggtcctgtaccagggtcctgccaaggcggacatgtccggtgagatagcggaatggctccgccttatatcagcgggacccggcagcaatatacataaccggtattccctgatggcccttcaggtcatggacgaggccagaaagcagatgggaattgtgtttccggcggatgaaacctttgcctgatattacattttatccagcagataatacatggttttgcaggcggatggtacacagtttgcaggcggatgatacacagttttctcttgtgcgaaaccccaattcgtcgtatactataaaataatgcgaaaattcaggaggatacagtatggacaagattaagatgaccaccccgattgttgagatggacggcgatgagatgactcgaattctctggcagatgatcaaagacgacctgctgctgccatacatagatttaaagacagagtactatgaccttggactggaatacagggatgagaccaacgaccaggtaaccgttgattccgccaatgccaccaaaaagtacggcgtggctgttaaatgtgccaccatcacccccaacgccgcccgcgtggaggaataccacctgaaggaaatgtggaagagccccaacggaaccatccgcgccatcctggacggaaccgtgttccgcgcccctattgtagtaaagggaatcgaaccatgtgttaagaactggaagaaacccatcaccattgccagacatgcctacggcgatgtctacaagggttctgagatgaagataccgggtccgggaaaggtggagctggtttacacggccagggatggttccgagagccgggaactggttcacgacttcacctgtccgggcatcgtacagggcatgcacaatatcaatcaatccattgaaagctttgccagaagctgcttcaactatgccctggatacaaaacaggacctctggttcgccaccaaggataccatttccaaaaaatatgaccataccttcaaggatatcttccaggaaattttcgacagcgagtatgctgaaaaatttgaagctgccggcatcacctatttctacaccctgattgacgacgccgtagcccgtgtcatgaaatccgagggcggttacatctgggcctgcaagaactacgacggcgacgtcatgagcgacatgatatcctctgctttcggctccctggccatgatgacctctgtcctggtatccccggacggcaactatgaatacgaggcagcccacggaaccgtacagcgccactactacaagcacttaaagggtgaggaaacctccaccaactccgtggcaaccatctttgcctggaccggcgcactgcgcaagcgcggcgagctggacggcaacaacgagctgatggaatttgctgacaggctggaaaaggccaccattgacaccattgagaacggcgagatgacaaaagacctggctctgattaccaccattccaaatccagttgtacttaacagcggggactttattaaggctgttgctaagaggctgtaaaacaaactatattgtctaaagggcatccggtccacggaatgattccgctggtccggatgcccttatttcaatccatactgccctgaaagcaagaccatcatgaacccccaccgccttctggctctgctctccatcttctccgaatcagacaggaggccctccggcctccccgccaaattaatccataaactgatccccataaccatagtgctccaccacatagtcgatatccttatcgcctctgccgcttaagcacaccaaaatggatccctgccgcatctcctttgccctgcgcatggcatatgccaccgcgtgggagctttccactgccggtatgattccctcatatctggaaagtttgaaaaatgcctccatagcctcctcgtcgcttaccgtatcgtatttaacccggcccagatcgtgaaggaatgcatgctccggccccacagaaggataatccagtccgctggcaatggagtatacaggagcaggctctcccttttcatccttcagcataatgctctcaaatccatgcataattcccttttcaccgaatttcatggaagctgcatgatctcccagcgtctcgcctcttcccaacggctccacccctgtgatatccaccgggtcatccaggaaaggtatgaacataccgatggaattgctgcctccgcccacgcaggcgcagacctcgtccggcatcatgcctgtcatttcaaggaactgttcccttgcctcatatcccacaacagactggaaatccctgaccataagcgggaagggatgggggcccagggcagatccgatacagtagatggaatccttgtaatttctggcataggactcaaaggctgagtcaactgcctccttcagtgtcttaaggccatgggtaaccggcaccacctttgcccccagaatcttcatcctggtgacattgggcgcctgttttgctatgtccacctcgcccatatgaatctcgcactccagaccgaaaaacgcggctgccgtggccagggccaccccgtgctgccctgctccggtttctgcgatgaggcgtttcttacccatgaattttgcaagaagtccttcccccatacagtggttcagcttgtgggctcctgtgtggtttaaatcctcccgtttcagatatatctggcaatttcctattttcccggacaggcgttcgcagtggtaaacaggagtgggccttccctggaattccttgcgaatccgtctcagctcattgataaactgggaagaatggcagatggtctggtatgcatccgcgatctcctcaaaagccggtatcagctcctctgtaagataagcgcctccgtaagcgccgaaacggccgtccttatccggataatttttcaaatatgtcctgtaatccatgtccttctccttagcggtgtattttctatccattatagccttattcccgcggcgtttcaatctgtattgctgtttttcacctgctgatttttccctgcacgcagccccggccgtacccatggatttaatctgaaccacctgtgctaaacggatcggagtacgaaatggaacggaatacgaaatgaaccggaatactatacggaccggaacgcttcctccaaatcctccaaaatgtcgtcaatgtgttctgtcccgatggacagccggatggtaccgggacggattccctgttccagaagctccttctcatgcatctgggaatgggtggtggaggccgggtggatcaccagtgactttacatccgccacattggcaagaagggagaacagttccaggttgtcgatgaatttcctggcattttcagccccgccccttatttcaaacgtaaaaatagagccgcctcccctggggaaatacgttttgtaaagctgctgctggaccggatcccggctcacactgggatgatggaccgcctccacctgaggatgcgcattcagatattccaccaccttaagcgcgttttccacatggcgttccacccgcagggaaagtgtctccagcccctgtaaaaacaaaaagccgtggaagggtgagagggtcgcccctgtatcccttagaagaatggcccgtatccgggtgacaaaggcagccgctcccacatcctgggcaaaacggattccgtggtagctggcatttggctctgaaagtcccgggaattttttggaagcagcccagtcaaaccttccgccgtccacaatcacgccgcccaccgcagttccatgaccgccgatgaactttgtggctgaatgtaccacgatatcagcaccgtactcaatgggacggacaagatacggcgttgcaaaggtattatctattaccaaaggaatctgatgccggtgtgcaatagaagcaattttttctatatcagcgatatcggaattagggtttcccagtgtctctataaagacagcctttgtattatccctgatagctgcctctaccgcctctaaatcagccggatccacaaatgtagtctccaccccgtattccggaaaggtgtgggccaggtaattgtaggtgccgccgtatatatggccggaagacacaatatgatcccctgcccgtgtcaggttctggaaggtataggacagggccgctgccccggaagccgtggccagggctgccacgccgccttccagctgcgccattctctgttcaaatacatccagggtaggattggtaagacggctgtatatatttcccgggtcgctgagattgaaccgtgccgccgcgtggtcgcagttatcaaatacatacgatgatgtctggtaaatcggtaccgaccttgcccctgttgaagggtcgggctgctcctgacctccgtgaagctgggttgtctcaaatttaaagtgtctgtctgatctcttacgcttctctcccatgatattgtcctccgtctcttaattcctactatttctataggtttaattgataatatcatggtatttttttcctgtcaagaatttatttacgtacattcttaaaccttatttttgagtccccgcgcattctcaaaccatacttcccttatccatctcaggcattcccggcgcgcttttatcagagggcgcgcatccaaacatttttttgtaagccctgaaaaaactggagtagtctccaaatcccgctctggacgctgcctctgctgccggcacccccattgacagctcttttctcacaatggccatgcgcttatataggatgtaccgggccaccgtggttcccgtggccctcttaaatacagctgtgagatgatttttgctcatatagaaggtctgtgccagcccttccaggctcagcggagcggacagattctggttgatatagcggatgatttcctggacctgtccttcctttcccctggaagttcctgaagcctccctatatattgcaaaaatcttggtcaaaagagacagaacccgtgtgcggattgcaatatcctgtaaatcttttccataatttccacactcctccagggagtgaaaataccactccagctgaaactgttcctcatagcagcaccatccggttccaaaaggctccagcaaaagagcctgttcctcttcctgcagaagttcggcggcaaagtgcagacgtatccggttatattcatccgaatccagcacccttaacccgtgaaaacagcccggcggtatgataatcaggcttccgggcctgggtgtgtaggtcctgccctccagcagatactctgcgttgcctgaaatcatgtaataaacctcatatacatcatggcagtgcattttatactccatatccccttcatcgctgcgcgtatgggcatataccaccctctgcgtcttaaaactttcttcctggtacatggatctcctccttaaaaataccggctgtccccagccgtccctgccctccgcggccgcaagccgcaggtgcgtttaaccctattctaacacagcttgtgctaattgcaatatttctttgtcttctgacaatggtttttgcaatatacctgtattataatgtgtcctgtaagcaagaaaaacacagcaaataaattgttgcaaaaaccgaaagggccctccccctttcacacattttatccccctttatacacagtaaaagaccaggcatccccagtgcctggtctttgtgtaactgctgctattcggaaattctatgattttttctgtgattcgctttatggccagattgcccttgccgccttggcctccactacccgcttcacggcaatcaggtaagcgccggtgcgcagtgtggcgttctgtctctttgcaatatcccatactgcttcaaacgcaggatccatgatatccttcagcttctcgttgacttcttcctcggtccagctcacggattgtatattctgaacccattcaaaataagaaacaactacgccgcctgcattggccaggatatcaggcacaacagtaatgcctctttcctggagtatcccgtcagcgtctgcggccaccgggccgtttgcagcctccacgatgatttccgcacggattttatgtgcattggaagcgttaatctgattttcaagggctgccggcaccagtaccctggcatccatctccagcagttcctcattggtaatgcggctcattccctcttcattgtaatcctttaacagattctttctgttaagggagaggtattccaggatagccggtacgttaagtccttgcggattacagattccaccggatacatcgctgaccgctatgatcttcattccttccctgtgaagcagcttggctgtgatgctgcccacatttcccattccctgaatggctaccgtggttccctgaaccggaattcccattttattcagtatattttttgtggtatacatgacgccccgtcccgtggcttcatttcttccaagggcgcctcccaggcagattggcttgcctgtaaccacgccgtggatgcagtggcccttcagcatgctgtaggtatccatcatccagcccataacagccgcattggtacctacatcaggagccgggatatcctgttccggcccaataaggggagcaatggctgccgtgtatcttctggtgattgcccggatttcattttcagacagctcattggggtcgcagacaacgccgcccttgccgccgccgtaaggaatattcaccactgcgcacttgaatgtcatccaggctgccagggccctgacctcgtcaggatttaccgcaggatggaaacgcactccgcccttggccggtccgcgggatgtggagtgctgcaccctgtatccctcaaataccttcgttgtcccatcgtccatccgcaccggaatcgcaaccttaagttccctctccgggtacttaatggcctctatgtcactgtccgtatagcccagtatatcggctgcttcctttactacctttaacacattgtcataaggattatatagtttctccatacctgttctccttttctgcccggctgctgcctgtttatagtatcccaatacttagttcccctgattcaccactgactcgattcccgctatcttaacgcacagaataaatatgtccatggctgattttaactcttccggcgtgggataggtgggagcaatgcggatatttctgtcctgcggatccctcttgtagggataggttgcgcctgcgcctgtgagcgtgacacctgcctccttagccagctgcacggtgcgctttgcacatcctgcaagcgtgtccagggagatgaaatagcctcccttcggacggctccacactgccagtccgctgccttccagttcctcctccagacggtttaacaccatgtcaaatttgggcctcagcacctctgccagatccgccatatgggcgcggatgttttccggcgttttgaaatactgcacatgccttagctggttcagcttgtcatgtccaatggtctgtgaggacatatggcccttaaactccttcatgttgtccggtcctgaagcaataagggaaatacctgcccccggaaatgttatcttggaggttgagaagaaatagtaagccctgtttggatggccgccggcctcacatgcatccaggatatttttgaggggcacttcctgataaatatggtgcacaccgtaggcattgtcccagaatatcctgaaatccggggcagccgtctccatagacgccaggcggtccaccacccggtcgctgtagcataccccttgaggattggaatgaaggggaacgcaccagattcccttgatggaagcatcctcccttaccatggcttccaccatctccatgtcaggtccgtcctccagaagcgggaccggaatcatctggattcccagctcctcgcaaatctggaaatgcctgtcgtaccccgggaccggacaaaggaatttcacaggactgccctcatatgcatagaagctccatggcttttctccctgtgttccgaaaagacagtggaacgccatggtgtcgaacatcagattcaggctggaattacctcctattataatctggtccggcttcaggcccaaaagctggcccaacagacgcctgcattcaggaatcccttctaaaacgccgtaattccttgcatctgtaccgtcctccagcgtacagccctctggaaactccaacaggcccatgttcatatccaactgggctgctgcgggttttcccctggccatattcagtttcaaattcaatttcttggcttcctggaactgtatggtaagctcttttaacatatcattcagttcctgtttggaatattccgttacatgtctcattcatggcctccgcatcaaacattagtcagatatatttgttcttgcctttattataaaaatatcctagaataaaaacaaatatttatatttgaataaaacatataatcaaaaacttataggaggtgcagctatgttcagcgggatgaattacgtatacgaagtctataaggaacagagcttttccaaggctgctgagaacctttacatatcccagccggccctcagttccatgattaagaagattgagacaaagataggcatgcccctctttgaccggagcaccagccccatccagctgacggaatgcggcaagaaatacatcaagaccgccgagaaaatcatggacctggaaaatgagttcgcctactatgtgggcaatctccaggagctgaaaacaggccgtctgtccgtgggcgggacctatctcttttcatccttcatttttccacccatcattgataagttccgcagggcctaccctcacgtgaagctgaacctgtttgagggacacaccccgctgctggagcaaaagctctttgccggggaactggacattatcatagacaactatctgctggacgctggcatctacgaaaaggagcgcttcatggaggaacgcctgctgctggctgttccctcctcctttgacagcaaccggagagcggtaaaataccagcttaaggcttccgacataaagcgctgccttcaccagaacgatacctttccggccgtatccctaaagaagttcaaggatgagccctttgtcatgctgcggtcccacaatgataccagggaacgtgtggacgccatactgggccgggcaggaatccagttaaactataccttaaagctgaaccagctcttaaccacctatcacctgacagagtacggcatgggcgcctcatttgtcagcgacaccgtggtcaaatgccttccggaaaacccggatatcatatattataagattgacgaccctgaggcagtaagagatgtttacctgtattataaaaaaaataaatacctgacccggagcatgattgaatttatcaaaatggcaattccgggcattgagaaaaactcggagaagtatgtataatcatatgcttataagtgttataagtgtcattttttcagcaaataaaaatacagaagggggtaagaaaaatggttggatggccagaaatccttaaaaaggaaaacctgacaagggaagaaaaaaaatgtatctgcaaccggctcatgaccacggagagccacatggaacagctgatactgaagcatttcacagaggaggatttccgcagggtctggatgcgcaaaatcggcgggggcgtaattggaggcaaggcctgcggcctgctggttgccaggaagctgattgaactcaacatgccggagtacgcagggcatgtggaaccccataactcctttttcatcggcacggatgttttctaccggtatctggtatataaccgctgtgcggagttaaaggccagacaccgtctggaaaaggaacattttaaggagaccgaggaactgaccaaacggctgcggggcggttccctgcccgaagatatacgtgaagagctgagcgatatgctggaccactacgggaccaccccaatcattgtccgttccagcagcatcatggaggacggatacggcaatgcattctccggcaaatacgaatccatcttctgtatgaaccagggcactaaggaggaacggatggaggaactggaggaagccatccgccgcgtatacgccagcaccatgaacgaacaggccattgaataccgcaggaaacgccacttgctggatgtggatgaacagatggccctgctgattcagcaggtggccgggcagcagtacggcgacctctatatgccggtggctgccggtatgggctgttcctataacccttataaatggatggagcacctgaacccggaagcaggaatgctgcgcatggtcatggggctggggaccagggctgtggagaggacgcccggcgattacccccgtcttatcggccttgacagggcgcaggccaacttaaggaccaccctggctgaacgccacaaattttcccagcgcaaggtggatgtcctggattttggaaccaagtcgctctgtaccaagtccctggaaaaaatactggacctttttcccaaatggcagaagaaaatggtgctgagcagggatacggatgccgaggacatgctggccgagcgccatatatacagaaccatctattttggggactgccagggcctggtggacaatctggagttcatacggatgatgcgcaccctcatgaagatgctggagaaagaatatgaacgcccggtggatgtggagtttgccgtcaccagtccggaggaaggcatatggaggctgaacctgctgcaatgccgtccccttcagaccgccaaatccgagcaggtacatataccggacggcgtggaccacgaatttctctttgacgtgcgcagaacgtccatgcgccggtccaaggaggaacccatcgactacattgtgtgggtggatccccagaaatactatgaatacgaatatgccaagaagccggacgtggcccgtttaatcagccgcatcaaccagcattttgaggatacggataagaagctgatgctgctggtgcccggccgcatcggaacctcgtcccctgaattaggcgtacccgtggtctatgcggaaatcagccagttcagcgccatctgcgaggtggcttacggaaaggcaggctaccacccggatctttcctacggcagccacatgttccaggacatggtggaggcagatgtgtattacggcgccatcaatgacaacagcaagaccaggctgtaccgccctgaactcctcaccagatatcctgaggtgctgaaggatattctgcccggcgaatcccaggaactggctgacattgtaaagatccatgatgtaagccggtccggtgccacactgaccctggatgcccaggagggccgtgcggtgtgccggatacgcggggaacagcagactgccgagcggtaagtggaatacagcgccccatacagcaggcgggaaacatgagacatgatacctgtatcatgtcagactgcagatacatcggtgctcaggacgcaagtccgggcaccgaactactttaacatagcctaatttttaaaaattttatgttgaaaggcagggacaatcaaacattcatttactgccagtattagaaattcttgcttctgcgcttgttctcaatcaattctaaatcaggattcactctatctttctgctgccgatacaaccggaaaaacatactgcacgttcaactttagaaatacggattcagcaaaaaatcccatttaaaaacactccgacgatttctggatatactgacagtttttaaataacctaaaaaaacgcatcaggctcatactaatcatgaagcctgtacaaggccaatcaacagaaaggagtgaatcatatgaatttatgcaattgcgacgccaaagttcctgcatcacaatgcgggtgcagcaaagagcttcccgctcccggaccaggagtacagctggccattgccactgttcccatgcagccctgggaaacaccttatgagccatccaaagccctgaaacagggaactatttttccctgcctggatctgccgttttttatagtaggaggtgaaaaaaatgcctgaccgctgccagctgcttcagcagattaatgagataagttttgttgtcaatgacctgaacctgtatctggatacccacccaacagacggccaggcattagacgcgttcagccaggccatggcccaaagaaaacagcttctggattcctttgccaaggaatatgaaccccttaccctgaactgtgtctgccctgaaaccaataacaagtccgaatcccataccaagtatcccggccagaagcattttacctggtcagacggacctctgccatgggactgcccggaacattaaaataaggaggtgtctgaccatgtggacttatgaaaaacggttacaatttcccgtaaaaattacccagacctgtcccaagacagcgtccctgattatcagccagttcggcggtcctgacggcgaattagctgcttccatgcgttatctttcccagcgttacactatgccatgcaaggaagtgggcggactgctgacagatattggcacagaagagcttgcccatctggaaatgatctgcgccattatctatcagctgaccaagaatctgaccccggaacaggccaagacagcaggctttgacgcctattatatcgaccacaccacagctctttggcctacggctgctgcaggtgttccctttaatgcctgcgaattccagtccaaaggcgatgccatcacagaccttcatgaggatctggcggcagaacagaaggccaggaccacgtatgacaacctgatccgcatcattgaaaacccggaggtaagagaaccccttaaattcctccgggccagggaagtcgtgcatttccagcgtttcggggaggcgctggaaaagataaagtccaagctggatgaaaagaatttttactacttcaatcctgagtttgataagcagtttgtacagaaccagaaataaaagataaaacacgacgctgcctcgcatgctgaactgtatgcggagcagcggactacatacaccaactttggaggttttacgtgattaactcaactgacactcaaagggattcctggaaaacaaattggggatttatcctgtcctgcatcggttccgccgttggaatgggcaatatatggatgtttcccgccagagtctccaaatacggcggcggcacctttctgcttccctatttcctctttgttattatgataggcctttccggcgttatcggggaaatggcattcggccgcgccgcccgctccggacctataggcgcctttggccaggccatggccagcaggggaaaaggacggcgtctgggagaagccatcggatatatcccggttctgggctccctggccctggctatcggatactctgttatcgtgggctggatcctccgctacagcgcgggttccctgaccggcactacactggctcccggcgatgtggacggctttgcccttgcttttagttccatggccggatccttcggaaataatatctggcagactgttggactggttatcacctttatcatcatggtactgggcatatccggcggtattgaaaaaatcaacaaaataatcatgcccctattcttcctcttgttcctgggactggctgtctacatggcgttccagccctctgccgcggatggataccgctatatcttccggattgaccttaaaggcctggcagatcccatgacatgggtattcgccctgggacaggctttcttctcactgtcactggcaggaaacggcaccttaatctacggctcctatctggatgaccgggaggatgtgaccaatgcagcatggaaggtagccctttttgacaccctggcagccctgcttgctgctcttgtcatcatcccggccatggcaactgcgggttccgggctggatgaaggcggacccggactgattttcatttaccttcccaacctttttaaatccatgcccggaagccgtgtcctggttatcgtgttcttcacagccgtactgtttgccgggatctcctccctgattaatctgttcgaggcccccattgccgctttacagcagcagtttaagctcagccgcaggacatctgtctccgtaataacggctgccgccctggccatcggactgtgcatccagggcattgtatccgggtggatggattttgtatccatctatatctgccctcttggagcaggtttggccggtatcatgtttttctgggtatttggatcggactatgcgaaaaaagaagtggaaaaaggccgtctgcgtcccataggaccctggttttctttcatgacatcctatctgttctgcggtttaacggctgcggtctttgttttgggaattgtatttggaggaatcgggtagtataattataccaatgatacatgtgattccctgtcattcgcaaactgacagggagtcttcttttatttacgaaagacgaggtagcttatgaaatcttcatcaactcaagaaaatccactgggtattctgcccgtgaaccagcttttggcccggtttgccatacccagcatcatagccatgctggtcagcgccctgtataacattgtagaccagttttacataggaagaagcgtgggtatgctgggaaatgctgccaccaacgtggcctttcccctcaccatcacctgtactgccatctccctgatgtgcggcatcggcggggctgccaattttaatctgtcccttggcagcggcgaaaaagaggaagccacacgctatgcaggcaacgctgtatttatgctggctgccataggggtcctcctatgtctcacggtcaggcttttcctgaaaccgcttatgattgtatttggggccactccggatgttctggactattcactgacctataccggcatcacgtcccttggatttccattccttatcctgaccacgggcggctccaacctgatccgcgcagacggcagtccccgtttttccatgatgtgtactctcacgggcgccgtcctcaataccatactggacccgttgtttatcttcggcttccacatggggatggcgggagccgcactggctaccatcatcgggcagatcatatcgggcgacatggtcattgtatacctgacccggtttaagacagtgcgcctgtccctgggctctcttgtgcctgttccatcccatatgaaggccattgcagccctgggtatggcccccttctttaaccagatggccatgatggtggtgcagattgtaatgaacaacatccttcgctattacggtgctcaatcccattatggaagtgagattcccctggcctgcgcaggcatcataaccaaggtgaacatgatattcttctccctggtcatcggtctgtcccagggattacagcctattgtcagctttaactacggcgccagaaaattcaggcgggtccgagaggcttatctgaaagctgtgctcatcgcaaccatgatttccaccctgtccttcctgtgcttccagctgatacccaggcaaatcatcggcatctttggctcaggcagcgaggaatactttcactttgcggaacaatacttccgcatattcctgttcttcacatttttaaacgggctccagcctatcacggctaattactttacgtccatcggaaaggcggcaaagggtatcttcatctcccttaccaggcagattatcttccttctgcccctgattgtggtccttcccatgttcctcggcattgagggcgtgatgtactctgcaccggttgctgatttaatggctgccctcctggccctggtatttgttaccagggagcttcgcagaatgcggggtatggaagaagagatgaactgcggggcggagatggcggactaatcgcagcctgacggattggcggcctgacggattggcggcctgacgaattggcagcctgacagattggcggcctgacgcattaagggcggctcagatgtcccttgcagcccggataaagaaatcctcctggccgaaattgccggacttaagaatcagctccatcccttcctgttccgcaggatacataaccggaacccccggagcaatggaccgtccgatatgaaaggtgtgcatttccagcttctgcataacggcgcctgacgtctcccctcctgctgctatgattctttttcttccagattccaaggcataggcggctgtaccggccaatagttcctcgttataatgttccagtggcggatatgactccctccactctgcttttatacgatttacctcatcaggcggcgctgaagtgtacaccagcgctgcctgatctttattttcttccaggaatgccctgatgtgttccattgtctggatgccctgcacaaaccggaggggatggatacgcaaagaagcaccgccctttgactcataatacctgatttgtgtcctggtagcctcagaacagcttccagccagtatgacaggagccgcacaacgggacggtgtgagaacactcctctcctcatccggttcccatgtacgggcaatcatcctgagcagaccggatccgcctgacaaaagcggaagattcccgtattgtttagcaatcattctcccgtgcttctcttcataataatccgggatcaggtaataatgccctggtttctcgtaaggcctgaacccccgttccagttcacctgcacccaggttaaagcaggggtagcggctctgcctctccatcaggtactttagcctggaatccctcattgggttcagagggtgatccttcatcggactatcttccagcagtactccattgacatacagcttaccatccttcacgcttcttccattttccagcagagcagggcataaaagcgtgtacggtatgtcccaccgttctagggctgcatccagaaccgggcctatgtttccattttccgtggaatcaaaggtggaacaatatttaaaatacagcatacgtgccccatgggccttcagccaggaaaaggcagccatgctccggtccaccgcctcgccgggaggacaggttctggttttcagtgctatgaccactgcctgggcttccaagatatcctcatcctccctctcaggtatcccgttgctgagtatcacatttgcgcctcctgcctgaagaaaggaggcggcatcgctggcccctgtgaaatcatctgccacacatcctaatatcatactttaacctctcttataaaccctttaacgccttggcggctgcctccacgcctgaatccatgctgctcaggattggttttgtgatatctgccagacatggaatcaatacgctcatgctggcctgtgccaggaccagaacatcatactgtttccccgtatcccgaatcagcgcttccagtatctgattatgcttttcctgattcttctccgctgtcagcgcttcaaacgcatcggaagccaaataggaatccaccacaaccttctttttctctgcttctgcaatatggcttatgagcctcgcacttggctccagcgtggttttcaccgtgccgtatacagctatcttttcacccttttccactgcactgcgggccattggttcatcaattttaaggtaaggaatctttaaaaggggtcttatgacatccactccctcccccaccgaggaacaggcgttaagaatcagctctgctccccagtcctgtgcctcaagagcatatgttaaaagccgcctggtaacctcctttgtcagcattccttcctttttcacatcatttaaaagactatcatccacaatgttcatcacctcggcgtccggtaccagcgccttaagcctgctgttgatgccgtcgcaggtaacaactgtggtatggattaccgcaacctttctttccatatgcccctcctgattctataaaactacatttcttcttaccagcgactttttctttgccatttccatataatcctcaggcagtttccttacctggcgccctgcccccaggattgccagatacatttcacaggccctctccacattgtcgctggatatcatggcatcttccatggtaagacctgtgccgatggcgccatggctggccatgagcaggcctgcgtttgtcccaatagtattccttacatgcgctgccagctcaccggatcctggaggtgcaaacggggccaccagtatctccccgcccagatacaccacgccctcaatgtcaatgaccggcaccttctcaacaccgtccatggcgctgacagccgtggcaaatttggagtgtgtgtgcacgatgcagttaacctccggtctttccttataaatacccagatgcatggaaaattcaatggaaggcttatagggtcccgacaccacatttccatccatatcccccacagccaggtcctccggcttcatcgtgagatacggtctggctgacggggtaatgacaaacaatggttctccctccaccctggcgctgatattgccggctgtacccaatgcataccccttgtccaccatggtcctgcatccccacatgacctgctcttttgctttttgtattgctctttgtattgtttcctgtgacatatgattttctcccctctttggttcctattattttaatggctgttaattcaaatatattttcgtatcagcctggcaatctcatgtgcgtcctgcgccctccgcatggcgcttatattaccctcgtcctccagcaaatcgaacagctggtagagtgcgggcaagtgtctggtcttatccggtgtggccagcacaacgatgatatcagcatccatatatccgttaaaggacagtttttcaggaagcttaagaaacgacattcccatgctgtaaacaccgtcatccacacctgcatgggcgataatcacgccgtctgcaatcatgatgaaccgtttatccgtttccaccatatcaatggctttttcaatataattcctgttaataaaaccattgtccagcaacggtgcggatgccatacggattgcattctgccagtcgggcatttcctgggtaatctgaatcctctcgtccggcagcaggaagggcagacggctctgaagctttacctctccctccgaaacccgcatgttatccaataccttttccctgaatgatttcttggcaatatcattggcaaaaggaaacaccacaaactgttttttatctgtctccagccttacggtggagaacactatctgaaaatccttatcatattcataaaaatcccttaaggacaggcactctaaaaattcaatctcaggcagaagctctgacagagacacaaagagatactgcgatacggtgagtccattggtacacaccaccacggccctctctttttcctggacctgaatcagttttccctccttatgaagccatgatgcaaagagaaccgtaatatacacaagctcagggtccggaaaagtacatgtgagatacacttcatagggccttacggcctttctcacgatttcatgaagatactggtattttggcagtatcatgtccgtgatatccggttccacatgatatccataccagatccggtacacggcaggcttcatgtgctgataaaggatttccaaaaattccgcccttccgtccagccgtacacagctgatggactcaaaacgttccagcatgtgcatgcccgcgtccctgagcagctccagattacccatatcttcatagaccctgttatggacctttgaaatttgtatctgaactgcaaaatttacgatctcattttcatcctttatcctgtacttatctgcaaaggcagccaccacggaatattctttggtggtggttaccaggcggtaccggtccatggcttccacggtcttttcatttttaatccgaatcagtgtaaaataaaaaatatacagaagctccttcagacgttcatctgtaaattgaagctgaagcttattttctatctcctcgatatttgccctgagctcctttaccccttcctccctgattccgtatatacggttcaggttctcctcaccgcccggcatgttcagaagctttctgagggcatgtgtcaaaagctctcttttgtgatattcacttccgtaaaggcggtacccttccttcctgttatatgccagctccaaactgaatctgtttacccgttcctgtaccttcttgaagtcactgagcagcgtgtttttactgatttgaagctcttctgtaaaatgataggtggaaagctcatcctcgtggcagagcagccgtagctcaatccaatatgcccgctcctcgtccgaataggtataggaggacttggtgattgctgcttctttggcggaataatgctcagccaccggaccgggcaccataaagtacccggtcttcagccgcttaatctccggatggccgttatccctaagatagtcattgattttgtcaaagctatagctgagctgctttctcgtaagatggaacttttcctccagccccttgcctgtagctgatgaattatctacaatctcctgaaaaatcatataacttctgctatccagatacacgatatcacctcgtcaattcgattgcttactgtcccgccttggcattcccagcctccagagccgcgtcttccctggcctcacgcattaaatcacggtaatataaaataaaccctgccagccagactgcaaatataatcaaaggcatgaaattaccttttaaaaacataaacagatgggaaatagaatacgtaaatacaggaccattaatcaggctgttgctgatcagctctcccgcctgaaggtcaatactgcctgttgcgatggctaactctgtcatgaatggagcaaaggcagtccccacccacaggaacaccggagcgccgatgacgcagaggatagacatttgaagcaggtttcctcttgtcaccagaaacgccggcaatgccagggatgcgctcataagacctgcaaagggaaggatttcattgcccggcagcaccatggaataaatcagcataaacggtatgctccaaaggatagccagccatatctcattacagccgccaaggataggccagtccagacctacaatcagagtctttccttcaaactttttgttcatgaaagcgctgaccgcctcagaaatgggagacaaggcctgcatgaaatatttggccaccaccgggaacagcgtcatggcagctgcagccttgattcctgtggtaagaatctgggccagggaatactttgcgagaattccaaacaggcagcccaatataaatcccatcacatggttttccgcaaaaataccaaccttgtcttttaacatatccgtgtcaaattccctgttaagtcccggaatttttcttaaaacaagggcaatcgggtataaaatagctccaaagaataacgtagcatgggtcacggacacacccggaattcctgtaagcttttcaattcggtgctgatgtgcgtccgaagatttaagttccagtataatctgaaccgccgcaatcacaaaggccagaatcacactatgagtaatggataccacggcaactgccgtaaatatcttaagccatacattccataaatctgcgttgatggtatttgtcttgttgagaagtatcatcactacattgactgctatcaaaagcggaaacatgagaaatgcatagggccatgcccatgatatggtagccatggtgctccatccgccgtcaacaatgggcagcgagattcccgtagaggtcatgatggcctgggcggccggggttatgctgtccttcataaaggatatgagaagattcatgcccgtaaatgccacgccaagtgtgatgccggatgaaatcgcgtcctttatcttcatccccaccattatactgccgacaatcattataatcggtacaaatatgggagcccctaatcccaaaaagaaattaacaacatttgttaatacctgcatactttcccctccttctccctatcagcttttgttgaccgcatcaatgagctttttcagttcatcttcctgcctgacccctgtcaggaacgcgattccgttgataacaggtaccggatattcctttaccgtctttgtgatggttatataagccacacagtcttttatatccctgtccagggacttgatattaaccgcgtccaccaccgcgtccacctttctctctttaagcagacggtttaccttactggcaacagcctgtgacgtggcaactccatttgcacatgcaactataattctcttcatatgttcaccctataccttccattgataataccagattaaaatatgcttctatattagcagcctgcctcagcctttccataaaatcaggtctctggcaattgttaaccagtatctgaagcagttccacatgggcatcccccaccgcctcctgcttaaaaccaagcagaaatacaaaccgcaccatatggactacctcgttggcagccatctccctccatggaatcggttccttcaggcggatacaggcaataaatgcattcttaatgcattccgggtctgtatggggtatagccactgcatatggctctatgggaagggccgtgggatattccttctctctttcctttatgctttcaagaaaatcccctgtcacatatcccaattccataagccgcccggacattacttcaaataattcgtctgtgtttctcacatccaaatccagctgaatcaggtccttgtatacaatatctcccgtcatgatttggtactcctcattaattaatattaaagttacacgcgcgctcatgtatcttctccatacctgcattataaaggccggacatgtgtatttcaattcaaatagggcccatattttgtgcaatatgatgctcattcctgtgatgcgcaattattttatacataattgtgccttattttccctgtttcacccggataccatgtcactattcacaacaacatggtttgccaaatcacagggcagaatacaccttcttattgttccacaaaaaaatcctgatgacaggtacttctcaaaccgtcatcaggattctccctttcttctgttttctgcggctgtccaatcttctctcccagcctcacacccagccatcaatcacatcaattgaaaacttaaaatggtcttccggcataccctgctccttcagccgccgtctgattgtcttcatataatggtttgatatggccctgcatatttcctccgtatttccggtgcggcacacgtccaccagttccttgtggatggggtactggcgttctatcatggcccggctgtcagggttgcccgcataataattgatggcatttccatagtttaagtccgtccatcccttaatcagccgcggtaagccggtggaacgtatgatggcctcatgaagcatgttatcacaggcaatggatttgttataatccgtttcctttaagtccttcatggattccaatgcagcatccatctcggcaaaggcagtctctgaaaacactcccctgcacagctttactgccaaaatctcataggtggccctcagcagataaatctcgtaaatgtcctccagggtgatatttttcaccgaacaccccacatttctcacatattccaccaggccttcctgttccagctgtcttaaagcctcccggatcggcccgcggctcaccccaagttcgtccgaaatatcctgttcaataattctcattcccggcgccagctcgtggttgaatattttcatacgaatgacgtccaccacattttcacgcagtgtctgatacgttaattttcccataaaagcaattccttttcataatcccacaacaattccagtgtattctgtcacaaaataatagtatcataagaaaatcccacggtaaacatattgtctgaaaaaatggcaaaactccggcaccttggatcacaagcgccggagtttgtctgaggctttcgcctttcatcatgtttacaggccgcatatacccttgatgacataggatacaaagatgcccacatagtttccgcaggctccggctattacacccatgattaagccgacgttaatcagggatttccagtctgcgcccgccgcggtcagggatgaggttggcccgtctacaatacatcccaccatggacaggattacatactcatacttaatcttaaatatgcggcagataataaggtgcagtacgatacatccaatcagcataaacagtacatacagtgtcatcattagcgcggaaccgataaactgctgtaaatccacagcaaatccaatggttgcaaggaaggtcagggaaataaacagacccaggtcaagatttccgcgcagcttctggacaggctttaactgtgccaggccaatggataccgtggtaagaatcagcagccttcccgctttccagaaggtatccggaaaaatggactgtgcaatcacagtacatacaaaggaaacaccgaaaccaatggtcaaaagccatgcaatatcccggatagaccatctcttatcggacatcagaggctcgtcctctccgtcgtccagctcctcttttgtaaactggtaaggccacagcttgttccagcgtttggacgcctttaagatagccggagccgcgaacagaaataccattaagggggtggacaccacgtagtcagctgcattggcggccgcaagggtttcccttgaacagtccagaccggttgcgatagctgtcaggttaggtgttccgcctgtgtaggtgcctacaaacatgccggcgcacttccagccctcagtaattcttggggcaaagaataatcccagtatgatggcaataaaacatacggaaaaaatagcagataccaaagcaataaccggctccctgttcagcttcttcagctcacgcatattcatgctgagcaggcagatagatatggcgggcgtcacgcagtatgtagacaacgcactgtaaaaatcatgtgaaatcggcaccacatgggtgttagaaagaataattcccaataccactactgtcaaaaccggccccagtgacttaaatgctttgaatctctgtaaccaaagcgcaaatgctaccatgattaaaatcacgaatatcaggccttcggtacgtgtaataagtgcttccatctttttttcctcttcacctttcatatattgatgattgtaaattgtggattgtggattgtcaacaatccgtattagcattatattaacacaagttttaaaaatattcaatatacaaaagtaaaaactatgttttttatgcattatttccagtttctgttgattttcaagataaaccagacctgtcctgtctcttttccatacccacattccaaaaaaagtaaaaaaatcccgcagacaagccaatatggcctgcctgcgggatccaatccgcacattatatattccgtctgcgcgatacagtgcagactacacgatgccctgtcccagcatagcctcaaccaccttctcaaatccggcgatattagcaccagccacatagttgcccgcaacctggtaacgctctgctgcctctgatacctttgcaaaaatatttaccatgatggtgtgaagcttatcgtccacttcctcaaaggaccatgacattcttaaggcgttctggctctgctccagaccggaagttgccacgccgcctgcattggcagccttacccggcataaagagaatcttcttctccacaaacaaatctgtggcttccctggtggacggcatattagcgccctctgccactgcaaagcatccgttggcgagaagtgtctgggcatcttccagattcagctcgttctgggttgcgcagggaagggcgatgtcacatgggatgctccagattcctcttccctctgtatacactgcggttggcacctcttccacatactccttgatacgtcctctgcgtacttccttgatttccttcacaatatccagctgaatgccgtccttgtcatagatataaccgttggaatcgcttaaagccactacctttgctcccagctgctgtgccttctcagttgcgtagatggccacattgccggaaccggatacaacgatggttttgcctgccatatccttgccgttgtgctttaacatctcatccagaatgtataccaggccatatccggttgcctgtgtcctggccagggaaccgccaaaggtaagtcccttgcctgtaagtactccctcatacaatcctgtgattctcttatactgtccaaagaggtatcccacttccctgccgcctacaccgatatctccggccgggatatccgtatccttgccaatgtggcggtacagctctgtcatgaagctctggcagaaagccatgacctcgcggtctgatttgcctttgggatcgaagttggaaccgcccttgcctccgcccatgggaaggcctgtcagggagtttttaagtgtctgctcaaaaccgagaaacttgaggatgctctggtttacagatggatggaaacgcaggccgcccttatatggtccaatggcgctgttgaactggatcctgtatcccttgttcacctggacagctccattgtcatctacccacggtaccctgaaagatacaattctttccggctccgtgaaacgttcaagaataccttccctgcggtatttttcctcattggcatcaatgaccagctttaaggaatccagtacttccttgacagcctgatgaaactccggctcacccgggttctgtgctactactctctcataaatctcatcaacgtatgacatttcaatcgacctcctggatttttgtttgtgaagtgtggggatgctgtgccggcagtgggtccggcacacactttaggaaaagtataacaagttaatatgttaaagtcaagaagtatgtaaaccgattttcaaaatcactgtagccggattttccgcggttttaccggatgtttcatcatttaccacctgaaatcggtccggaactccacttcacccctttggccgctccagacagaacagcttcttattctctgaaccgcactgcgtcaccttaaaattaagcaggtttccttcctcggtccagaactccatggcatccagaatccgcgtcaccgtggaccggttcataagctgttccttttccatggcaaagggtccgaactccctgttgacaaactctgttatctccgtaacggaaagaggtctttcctttgtggcatgattctccaggatattaacaatcaataatggaaacatggtctgatgcatgtgaatcttcctcgccttccgcatcaaaaaagggcctgcctggggccctttgtaccatgttcgctaaaagttcataaaacgtatttatgaatcgtttcgtcttatcccgggctttggcagttcctgttttcagttacaccaatccgtccgctgccatagcatgaataactgctggcaccggacttcccataactatataaccttacctttataaacactgcttctgccataatgctctccttccgattatgagtatacactttttcttccaaatttgtcaacgcagatgggaggattcggacctccggaccggttactgccggcctgctccttagcggggagccgcattcgaccactctgccacatctgctgattgtacgcccataccttatcccggtatgggcgcgcccggaacctgtctgttaacagtcctgatgcgccgggttggattcgagccaacaatgttcaccacctgggtcacggttttacagaccgcttgcttcagccatttgcataccggcgcttatggagggaggccggggaggcctccgttctcttatgtcagtactatagcatatggacctgggcaaatttgcattatttttaaattaacccggcattctcattcctgtacaccattatccctgtataccgttaatcctgcaccccggccagctctgccagctgctccagcacgcctttaccgccgttaagggatatattgcccaccttgtcgcagatcttctccagatactccatctccttcagcttgaacagggtgcggttttcatccataagcctggcagtgttcaaaaggcttctggtggaagccacttcctcccgccgcatgatgacattggcctgggcctttttttctgccatcagcacggtattcatgatttcccttatctctcccggaaggataatgtccttgatacctgccccggttatctccacgcagtattcctcctgatactcctttagcttatccagcacaaaccttccgatttcctccttctgttccaggagctcatccagcctgtaccgccccacatattcccgcagtttcagctggacataggtatagagctgggaagccaccccctctacggtctgaaccagcttctccggattggtaatccggtaattgcagattatatttaaccgcacagccaccttatctgcggtaaggatttcctggccggagatgtcaagctgctggatcttcatgttgaaaattttgcaggtaacctcccttccgtaattccagaagtaataggtacctgtgtccagtttcttttcatagcggttgtcaaaatacaaaagacctgtctctccgtcctttataactattttcttatagtacttggatggcatcagatccatatacatccggggaagggtatcctccatataaggctgtgttatgtcgatgagccggaattcatttttctcaaatacattccagtacaatgtctcaggctttgtgattacttccctgtacgccttattcacaaaccggagagctatgcactcgtccggcagcactgccttcactaccctggaggcaaacttttcatccttcatgaggatttcctccggtattccgcacgttttgacttcccctgtcataggcactgtctgtacctcatatcccaacatgttcaggtaagaatacctgcctgctgtcagcagttccacgaaccggccgtccttcatcaggtagccgcattcctgctctttgattatatatttctttatcatcatatctgaatccctcattattatgaatctgtaaaatttgtttgatggaaaaggcggatgcccggctccatcctcctgctgcgggcttctgcttaagcacatcctggaagggctgggcgttacggccctacccggatccgatccgtaatgcgctgacacgcattccgtacaggctccatccgaacgggaaacactttatcatccggcctatccggattgaccgtatttctggcccggcccattttgtgcggtatccgcagccgcgctgggccgcagaagaactgcctttccctgttttaaacaggttcggcaggagcgaaggcatcccttctccttcctggagacatttggttatgtcatcatttttaatgattgctatacccacttagctacgtgttatcatacacggcgggagtcgaacccgcgacacatcatcctaaaaggctgcagattgccggcatacccttgaaccacaggccgggcaccggggagtcccaggaagtaaactccgcctcttaaggcaaactgccgatatttatgtaggacaggcctcccgtccctctgacgggcgcctgcttgtttttccccggccccggcatactgccgcggccttctatcctttcaccacgcctattgtcttaaggcgcttcacaggcaccaccagatcctgctggttatccatgacctcctcaatattcttataggcaaaccggctctcctccgccacatcggcctttccctttttacccagaatcacaccctgtttctgtaaatccagaatgacttcctcacaggaaaatgccgccatggcaccttttcttgaatactgccgcccggctccatgggatgaagagcagaagctctcctggtttccctttcccatgaccacatagctgtaagaacccatggcccccggaataacggctaattctccgttctgagcgctgacagcgcccttcctgtggacccacacatccttcccatagtggttttcaaaggaagcgtaattgtggtggcagtttatgtcgtgggaaaactccagtgaaagttcggtatactttccaatccatttttccagaatggccttcacggctaacatcatcttttccctgttctctttggcaaaatccatggaaagctgcatccagttaaggtattgtttgccctctctggtatccaccggcaggaaggccagcctgtattcatcgggcacagcgctgaaccatttctggtttagctgtcttgccttatagtggaagtaatcgcagacagactttccgaagtgacggcttcccgagtgaatcattacagccagataaccgtcgtcatcctcctggagctcaatgaaatgattcccgcctcccagcgtaccaatttggtaatatcccgcctccagctgtcctaagagctccccatcctcctcataccggtccatttcctccaaagcaccgtccatggtatagctgggcatcatggtcttatggtgtgcaaatcccaccggcacgttgcgcatgatatcacctatggcagcctggaggagggagccgttgcccgtgataacctccctgatatcagccaccttaatgttggtctcggtataagccataccgcagccgatgtccacacccactgcattgggaatcaccacgccgtctgctgcaataacacctccaatgggcattcccattccggcgtgtgtatccggcatcagactgacccacttatgaaggaaaggcagctgtgaaagatgatatgcctgttccagacagcttccttccaaatcctctcgttccttcagccatactcttacaggaaccttcatcttttctttttcatacatcacaaacatatatctcacatcctttcttcttcactctgtacgccgtcaatggatgattgggatgaatcccgccctgccggcgccgtggtaatctgtcttaccgttcatatatttgcgtatgtatcttaactacatgcttataatactcaattttaacatggttatcatttaaaaaaagttgcgaacttccattatttactataatatctatactaacgtttaaattgtacgtatgctgtaagaacaggtgtgtcagcttgacaaaatagaacattacattaaaatgatagataaaacagtcggaaatccacggacaggaggggacatatatggctgaattccaggaactaatcaagaattttgaccgcatccgggactatatgcgccagttttacgtatatgggttcaaggtaagaaatgatttcagcgaaaagagcgccagaacctacgacaatgagcgccggcgtattgagagctggctctcccggtatacaaagtccgattacacctccaagggaaagcatgtctacatcaatgtggacagcaagaccattccccagaatcccctgtacgctgcctggaagtccaaaagctttacagacaacgacctgatgctccatttcttcatcctggaccttttatgggactgtccggagggcatgtcatccaacgcagtgaccgaccttatatcccacaactacggggtggttttcgacacccagaccgtgcgactgaagctgaaggaatacgaaaccctcggtatactggtatcccataaggacggcaagaccctgtcctacgcgcttgctcctctcatgcccatggaaacagcaccgcagtgtgtaaattccggttacatggaaccggatgggactgaggaaggggaacagaacctgtggcagtgcctcatgacagccgtgaaatacttccaggaagccgccccctttggctgcataggcagcaccatcctggaccgtcaggatgaatgtaatgacctgttccagttcaagcaccattttatcgtacatacactggaggacggcatactggccgacatactgaccgctgtccgtgagaaacgcatgattcggtttgagaacaaaagcagccgcagcggacaggtttccaccctgtcaggagtgcccctgaagatatttgtcagcacccagaccgggcgcaggtatctgtgcctgtatctgccggagcgccgccgcttcagcaactcccgcctggactccattacccgggtgacccttctggagccatgtgcattttatgaggaagtactccgtgatttggaaaagaataaggagaaatgctggggcgtgtcctttggaagcggtacaagccgtatggaggaggtctgcatcaagctctatatagacgaggaaaaggaaccctacatcctgaaccgtctttaccgtgaaggaaggggcggggaaattatgaagatacgtgagaaccagtttctctacacaggtacatttttcgataccaatgaaatgctgtcctgggtcaaaacctttacaggccgtatcatggacatacagggcacaaatattttttctatagccaaggtaacccgggattgggagaagatgtatgagatgtactgcgggaatgaggagtaggatgccatggaattatttcacaaaatatacagctgttattacaatgtggtccgccacatactggatgaagcaggtcacagccccataaccaggcaggatatggaggatatatgccgcgcttacggtttccaggaaagcgccctgtccatcatccccaaactgacggacagcacatgggcccttctggaagaacaggacaaacatacctttacgtcccgtctgggccatgctgttcctgcgctccctctcacgaacctccagaaagcatggctgaaatccctgatacaggacccccgtttccaactgtttttcacagacaggcagttagaacttctggccggggaatgggacggtctgccctccctttaccatgaggacgacttttactactatgaccgctacagggacggggattcctatgattccccctcctacaggaagcattttcaggctatacttaaagcaattcgggaggaacgcgttcttctggttgcctatgagggaaaacacggccgtgtccactcctttgagaccgcgccttaccagcttcagtattcctccaaggatgacaaattccggctctgctgtctccagctccaccggaatacgttcagccgcagcaccatacttaatctggcacgcataaaggactgccacgtaacctcaaagtcatgcccaccagaccttgaatcccgctgttttgaacccatccaaaaggcctcggaaccagtggttctcaaaatcagcggggaacgcaactccctggaacggtgcatgctgcattttgccaactatgaaaagcatacggaatatgacgcggaaatgaaatgctggatctgttccatccactatgatttggcagatgagacagaacttctcatagatattctgtcctttggccctgtggtccgggtacttggcccttcgtcctttgtacggcagatccgcaaacgggtaaaaaggcagcatgagctgttttacagcgagattacatagggtacgccgggtgactgcagaaaccacagcagcgcttcctgcctcagcgccccctgccccagcacctcctgcccagcacctcctgcccagcacaggacaggactgcgctccgcacaaaaatacgctccgcataaaaacaggataaaacaggataaatgaaaaagatgctgtatggctgtccggatataccataatacatccggacagccatacagcatcttttttctatagttccttattttcctctaatctgataatcagattctttacaagctcttccttactcttaaattccgtcctgacgccagtaatataccggaaagcctcctcccattcgctcatggaataggatgacatgcttaccgtgcgcacggcatatataatatcctctatataaaacggactgtggaggtccgaaaggtactgacagccggagagagcctgcaatctggccaacagccccccctgggatttatctggcatcatataaaactcctattcttctttctgcatgtatatttccaatttctcctgtgcaatctatacattgcaattatatatgacatttgtcgtaaaatcaaggaaatgcaacctatttcttgcatattccggaggaagccatggatcaaaaattaaagcaggatttaaggatagggccaaacatccgaaaataccgcatgcagtcacatctcacccaggatcaggtcactgcaaagatgcagctgatggggattaatatttcacgcagcatatattcccagatagaaagcggcacatataatatacgaatctccgagctggcagccatgaaggaaatatttaacatcaattatgaatctttttttgatggtatcatgctgaaccacagggataaacaataacaaaacaatatgaacaggccgcctgtcaaacgacagacggcctgttccaaacacaaaggataaaggtatttacccgcaatgggtacgaattatttaccgtagtatgcttttaaatacatttctttaatctcactcataagcggatatcttgggttagcgccggtacactggtcatcaaatgcctgctctaccatatcatccagcctgtctaagaagtctttttcatcaacgccgtaatccttgatgcaggacttgataccaacagtcctcttaagctcctcaatcttaacaatcagcttctgaactgcctcagcatcatccttggcctggattccgcagaaccttgcgcactccgcatacctttcacgggtatgtggatactgatactgggagaaagtacccatcttacgtggattctcagctgcgttgaaatcaaccaccagggaaatcagcagagcattggcaacaccgtgtggcaggtgatggaatgcgcccagcttatgagccatggagtggcatacgcccaggaatgcattggcaaacgccataccagccatacaggaagcatccgccatcttctgacgtgcctcaacatttgcaggctcattgtaagcggttggaaggtaatcaaatacgttcttcatggccttaagcgcaaggccgtctgtatagtccgtagccatgacggatgcatatgcctccagtgcatgggtcagtacgtcaacgccggatgcgctggtcagtcctcttggctggctcatcatattgtcagtatcaacaattgccatattaggcagcagcgcgtaatctgccagaggatacttgataccagtctcctggtctgtgataacggcgaaaggagtaacctcagaacctgtaccggaagaagtaggaacagcgatgaaatatgctttctcacccatcttcgggaaggtatatacacgtttcctgatatcaatgaaacgcatagccatatccatgaaatccacttccggatgctcatacagcacccacataatcttacctgcgtccatagcagaaccgccgcccatggccaggattacatccggctcaaattctctcataagcttggcgccggcctgtgcattagccagtgttgggtcaggctgtacatcggagaatacagtatatgtgattcccatttcattgagacggtctgtgatggcatgggtgtatccgttcttatacaggaaggagtctgttacgatgaacgccctcttcttgcctaaaacatccttcagctcttgtaatgctacaggcagacagcctttcttaaagtaaaccttctcaggtgcacggaaccacagcatgttctctctcctttcagcaacggtcttaatattcagtaagtgcttaactccaacattctcagatacggagttgccgccccaggaaccgcagcccagtgttaaggacggagctaacttgaagttatacaggtcaccgataccgccgtgggaagaaggagtgttgattacgatacggcaggtcttcattcttgctgcatgctttaaaatcttctcttcttcatttacattcacatacagggatgaggtatgaccgtagcctccgtctgccaccagacgctctgccttatccagagcctcgtcaaacgtcttagccttgtacatagccagtacaggagacagtttctcatgggcaaactcttcgctgatatccacagactcaacttcgccaatcagaatcttggtatcctccggaacctcaacgcctgccagcttggcaatggttgccgccttctgtcccacaatcttggcgttcagggcgccgtttacaatgatggtcttgcggaccttatcaatctcgcccggctttaagaaatagcagcctctgtattcaaattcttttcttacttcgctgtaaatggattccatgactgtcacggactgctcggaagcacaaatcataccgttgtcaaatgtcttggaatgaatgatggagttaaccgccatcttaatatctgctgtgtcgtcgatgataaccggtgtattgccggcgccaacgcccagagcaggctttcctgaagaataagcagccttaaccatgccgggaccgcctgttgccagaatcagatccgcatccctcataacctcattggtcagttccagtgaaggaacatcaatccatccgataatgccctccggtgcgccggccttcactgccgcgtccagaaccaccttggccgctgcgatagtacagttcttagcacggggatgtggggaaatgatgattgcgttgcgtgtctttaaggcaatcagtgtcttaaagatagctgtggaagtaggattagtggtaggaataacagctgcaatcagaccgattggctcggcaattttcttaatgccgtattccttatcttcctcaatcacaccaactgtcttggtatccttgtatgcgttatagatatactctgcagcgtagttgtttttgatgaccttatcttcaaccacgcccatgccggtctcttctactgccatctttgcaagtggaagacgcatcttgtcggctgcgcttgctgctgcaaaaaagattttgtctacctgctcctgtgtaaaggtagaaaaagctttctgcgcttcgcgcattgcattcatttttgcattcagtccgtctacgctgtcaatgatttccggaacaacctgctcgattttctttgccatttccttatcctccattttccttgtgtttgaatcagtacatttaggctgtacctgcctgtcaagtcattttaaattgttactcaattgctattgataattaattaacaatctcactgtttgcattataaaccttcgttaaaaaaatgtcaatatgtaaatgaaagattttataattttttttaggggggaaaccagggcaatcctcagacaagaaaacagctatcccctattgccatagaagatagctgtaactaaaaatcaaacatattccgaagctctaatcattgactcaaccgaaatcctttaattacttattaaaatagggggttcagtcaaatcttaagcgccttcctatagataactttttaacaattcaaccttatccagtctctcccaaggcaggtccaaatcattgcggccaaagtgaccataagcagctgtctgcttataaatcgggcggcgcaggtccagcatcttaatgattccggccggacggagatcaaaattggaacggataatgtccaccagcttctcattgctcaatttaccggttccgtaggtatccaccatgatggaggtggggtgagcaacaccaatggcataggacagctgaatctcgcacttgtcagccagaccggccgccacgatgttcttagcaacatagcgggcagcatatgcagcagatctgtcaaccttggtgcagtcctttccggagaatgcgccgccgccgtggcgcgcataaccgccgtaggtatcaacgattattttacgtcctgtcagaccgctgtctccctgaggtccgccgataacaaaacgtcctgtagggttgatgaaaaactttgtgttcccatcaatcatatgctgaggaagtatctcgtcaaagatgtattttttcacatccgcatgaatctgttcctgggtcacgctctcatcatgctgtgtggacaataccacagcatccaggcggaccggcttgtcattttcatcatactccacggttacctggctcttgccgtccggacgcaggtacttaagcgtaccgttcttgcggacttccgtaagacgcttagccagcttgtgggccagggaaatgggatacggcataaattcttctgtctcattggtggcaaaaccgaacatcatgccctgatcccctgctccgatagcatccagctcctggtcggacatcttgttttcctttgcctctaacgccttattcactcccagcgcaatatcctgggactgctcgtcaatggctgtgataacaccgcaggtatcgcagtcaaagccgtatttggcacggtcatagccaatctcacgcaccgtttcgcgcaccagcttctggatgtccacataagcgttggtggttatctctcccataaccagaaccagtcctgttgtggtggctgtctcacatgccacgcggctcattggatcctgctccatcagagcatccaggatcgcgtcggatatggcatcgcacattttgtccggatgcccttctgttacggactcagatgtaaaaagtcttctctccattttaatctctccttctttcagataaatgattaatagcagctgtaacatcaaccatttacaaaaaacaaagtccgcagcaattgcggacttgaaaatatcattaaatcttcaaatcctcttattgctcgaccaagtatgctccatagcatactcctcgctcaggctggcaccttccggccctttcgcatatcttgctgatatactcaaccggggttgccgtgacttcacaggtcctttgtacctccatcactctgaataagggatatttacgaactctttaattgtaaaatgtgttaccttccatatcttatagcaattatatatatatgtcaatactaaaatccatcatttcctgtcttaccttatggaaatccttccctgtccccctggatttgcatactcagatgtcacggaacctcccattcttctgatataggaagacaatatatccacatccaccataacctcatcccggattacattacatcctttaaacatggtcatgccgtcgcctccctgtttcagcatataattatgggacgctacggtatacgtcttgttaaggtcaatgggttctcctcccactttaatgtccattaccctgtaagcaccggacacaccggtgaaattccccttgtcatccgtctgaacgccggacttaacagatgtgtcgatggtgtaggtcagaccggaaacctgaaggaaaccgccgctctcctcaggacaattcctggacgccatctccagcgcatccttaatctgctgtcccgtggcctctatgacacatcccatattcccataagggaacacggccagggtgtcgttataggtaatgttgcccggcttaataacgcttcggattccgcctccattgctgagcccgatatcagcacccagctccgcacggtaagcatctgccgtcaaatctcccagattcgtctcagcgtttctgataatacgattccccgtggcaggatcattgactgtcagctcatatggcgtggtacccagaactgtctttaatgtctcattgtactggttctcgatagactggataaactgataggtcccatagtctgcggcctttccgtcaggattaatatagcttttgccgggaatcacaatattaagacccacaggaatcacatccgcattctttatcttatccagattgctgttgtaaatatcgatccagcggttatagctgcccaattccctcttcgcaatcctgcttaaggaatcatgttcctgtaccgtatactccctgtccaggtccgcagcaggcacctctgataccagctctgtgcgtatggatccatcggcagatatggtcagctttccgatatgattcagcttggtccccgtctgggtcagaaccacattctgtccgtttttattctttacgttctccgacgggaccgtctcatgggaatgaccgtcaatacacgcgtcaattcccgtggtattggcaatcacactggcggaggaccatttctgggtaatgccgttttccccgaggtgtcccgccagaatcacataatcagctcccgctgtcctggctgcatccacgctggcctgcacctgatcgtacagcttttggccgctctcgtcctcacagaaggaataaatataattgccctggctgtcctggaaatatgccggtgtggattttgtaaagctctcaggcgtggtaacgcctacaaaagccacctgagtagccccatatgtaaacatcttataaggcgcaaaaacaggcgcgcctgtggcactgtctataaaattgcaggaataatacccacaatttaatttcccggccagcgccagaaatctggacatgccatagtcaaactcatggtttccaggaactgcaaaatcatatcccacatagttcatgatatcaataagatacccgccgtctgaaagcgtgccaatgggcgctccctgaatggcgtcccctgtatccaccagggttacatacggcgtctgctgctgcatctccttcttatacaatgccagacctgcatagccgatgttgtcatccactccgcagtggacatcattggtgtacagaaccacgatatccttgtccgctgccagtgccgtgaccggaccgcctgtgagcggcaggcccatcaccgttacagtggtcaggacaattgcaagaaacaggctgcgcagccatttgaagctcttgtttttcatgattttcctccttattatgtttttttcaaaggttcctgccaccatcatatcatatttaagcggataagtaaaaaacgctgataacggttctaataagaaaatggggaaatcatcctgcctgtggattctttccccattttttgcgtatcctagtccgccgcctgatttctgcctccggcatttcggttattcactggccagctcgccctcattcgcctcttccctgcatatctcctgcccggactgataatccgtcacagccagctccattacggcctgggaatagttcacggacatcctgacatattttcctttttccctggctgcctcagatgcaatgcccgcaatctgctccagcacatccctggtcagatatcctccccgccagtggaatacataatagggctgtttcttcctcagcacagccttaaaacgtcccgccacgtcctccagcttggtcagggacagcctgttttctttataataaaaccttcccccgtctgtgcacgcaggcaccttatacaccaggggctgatggtccttaaatatcatcttgtcgtccagattaaaataatcaaaccgcttttgtccataccgtcccagggaattatcaaaggtcgcatccagatggtaccatgtgttcttcaattttaccagattccatgcgtgacggtaccggattcccctgtcaggagctgattcacttatggctatcagacactccagccccatcctgtcgcacagtattttcacggtcttggcaatgccttcgcagacgccgatcccctgctggagaggccctatgatttcatgggaatactgttttttcagcttgtcataggtcacattggagcagatgaagtcatgcacgtacttttccttttcctccggcgccattccctctgcctgccggaccagccggcttatcctggactccagggctgttttcatctcttttattttcttcttctcaaacatatattccggaatcatctgtacatactctgaattctgggcaaacctgtagtgaaagccctccacataaaatatggccggatggtccaggcggagccggaaaaaaatatctgacagctccttaccatccaagcgcagaaccggaaattccggcgacagtgactcaaatccatccaacatggccctataggcgttcttctgagctttattcatttgctggtaataaaattcttgtttcatattcgttccacatatccttcttaagtctgtttgtcctgcctctgaaagaaaaggcaggaaccatgcaccttccggtacatcctcctgccttgtattctctcctgttatcaaccaacccttaatttaaacttttgtacttcccggtcggaatctactttttcaatcatagctcccaatccctgaagcttttcctcaaaacactcatatccgcgctggatataaccgatttcatccaccaccgtatacccgtcggcggccaatcccgcaatcacaagggctgctcccgccctcaggtccggtgcattgacctgggctcctgtcaggccttttacgccgtctatgacagccacattgccctctacctttatattgctgcccatgcgggccagctcgtccacatatttgaatctgttctcaaaaatactctctgtcaccatactggtgccgttggccaggaccagggcaaccgacatctgaggctgcatgtccgtaggaaagccgggatagggaagggtctttatatccgtatgcctctgggcaggttttcccaccacgcgtacagcgtcatcaaattcaatcacctcacagcctatctccgtcagcttggccgaaatggcttccagatgcttgggaatcacgttcttaaccatgatatcgcctctggtggcagctgcagcgcacataaatgtgcctgcctcaatctgatccggtataatggaatactcagtgccgtgaagacggttcactcccctgatacgaattgtatccgtaccggctccctttatattggcgcccatgctgtttaagaagttggcaacatcaacaatatggggttccttggcagcgttctccaggatggtctgtccctctgccaaggccgcggccatcatgatattaatagtagctcccactgacaccacatccaggtaaatgtggcttgccaccaggtcgatggcatgggcaatgacagccccgcgctcaatggtcacctcagcccccagagccctgaatcccttgatatgctggtcaatgggcctgctgccgatattacatcccccgggaaggggaacctgcgcgcttttatatttgcccaaaagagctcctatgaaatagtaagaagcacgtatccggcggatatactcatcatccacagatacctcgcttatattgcttccatttatctttacagtgtgtcggtcaatccggtcaacccttgcaccgatttcctgaatcgcctctaacagtacattgatatcccttacatccggcagattatcaatcaccacatcatcgtcagtcatgatagaagcagccagtattcccagtgcggcattcttggctccgcttatggtcacatctcccaccagtggattcccgcctttgataatatattgttccattccacacctctgatttttatttaaacaaatccaatatataaggaaaatactcctaaagaaatctttaaaaatttgttcataatttatttacatcttcttagattataccataagaatcagatttgtaaagtaaaacgaaaatgcacaccctaaagtacactgtctactccactgccaaagcacacaggaaatcattctgcaggttcttgaaatactctgtggcatcattcagccccatcttctgtgtctcctgggtctgagggtcatagagcgtcacattgtactggtcgtagccggataaaagcacgtactggcctgattccacataggcaatcacaggaatacccttgtcaatatagtacagtatctggctcaggctgcatcctcctgcgtcaatgagaataagtccatcctcatagacgtggcttccgtcaaatgaatccagatattttgtcaccttcctggcctcatccaccggggatttgatattgcgtatgggctgtctgttgattctgtcccacacaatatgctggctgctgtccgtcacatacccaatctgcccataggccatctccactgcctggctgaaggttctggatgaacctaaataatgtccgcctccgtatgccctgaatatcatgctgttatcagatgatgcggaagcactggttcctgtatccagaacacttgtatattcataagaaaatgcctttggcgcagatgtacggacctcatttccgtgtatttccgaatctgcctgtacaaaataaacctttcccttatcctgggaggcaaaccagccgattccctccaaggggtccttctcaaccctctggttgcatacaatggtatcctcattctgatacagatattggttctcgcccaatggcacaagccgtttcagatgaatccgtccatcctgtgcaactacatccgttatataaatgccgtcctttctgtattcactctccacctgcatctgcgtatcgacaatgtacattgcatacataggcatacccttcatgcggccattgacaatccacttatccttggaactgctcagtccatatatcaaatcatttccaacaaatcccaatactctgacataatcatttacctcccctacgatttcctgtttctgggaagtattaaagtccataacatggaccttttcggattcatagaggttctggccttcctgccatgcaaaccggctggcatcgccgctgacagcatagcttccctctgtcaacccctgggccactaccagggattcattgctcttgagatcgataccgtacacagtaccctgaagcataatatacatcatgtcattctcgctgagataggacagtttatcaatgtctgctttcaccatatcataggattcagatgcaggcaggaagaacttttcctgtaccgtatcctgttccttatcatagtggtaatataccactcccatccgtccttcgtacttcccccggttcatatatccatacaccagaaaatccatagagccgtcatcctgcatggacaatatctttatgtcgtgcctgtcataattgcttctcacaccgtcgtccgaattgcttctgaacgaaaatacgcacaccgcctgcttatcatcatagtcatagcaccacagatctcctcctgttttaaatgccacatacttggattttggactcttcatggttcttactttgttgtcatttgtaattccaagaagaatctttttacctgaaaaagactggtgacctccgtcaaacacttcattggcattgcgttcgtaattcatcaggtagattctctgctcattccatttcatggtaaaattatcttctgcgtcaaccatggaacgtgttccgtcttcctcattaatggcgacctgataccgaatctggatttgtcccataatgccgtcaaactcctggagagtcatcagaggctctcccaccatctccacatccaggccgtcccatgttaaatggctgaagctggccctgatggtaacatgccccagtgagctgttatcctctgtgtcattggtttccagataggataccaaatctcttgcctgattatagtccagactcttcctggtaaactcctgggccagtctgaccatatctgacgcataagcgttatccggccacatgattctggtgtaataatgcagctccttttctcctgtggacacggtaattgaaaggagatatgtctcatttctggccagcaggttttgaatcgggagcaccgcgctgacgcttccgtccccgcttacccagtcttccacttctgtcctctccaccagcctgtccagagtaagatttctcacttcataactgatgcctgtaatggtatttccatactcttcaatccggatattcagcccacgatcttcaggcagcacagagatactctccctggctgcctgattccccatatcctgcatgtatccatgcaggcaattgatttcctgaccgcccagctgggtataaaccactggcaaagacggttcttccatagatgtatatacagctgattctttttccatcgtgtttctggcactgataaaataaactaccagcgctcctataaatatcaggaacaaaatccctgctttttgcaatatttttttcatatgtgattttatcctttatactggttgctctgtatcatttctattttatataatatccagtaaaactacaacttaatcttttcggaattttattaataatatctttgctgctcctataaggcacacagacctctggcacaccttctgtggaacatttcattcagcagaagtaccttgaccatgtctctaagccaggatggcctgtttccgggtttaggtggcggaaccggtctgggcggcattggtctgggcggcattggcggtctcggagggggaggtgttggcctgggtggctgtggcctgggtggctgtggcctcggcggtctcggcgggggcgggggcgttggcctcggcggctgcggcggtcttgacggaggcggcgttggcctcggtggctgcggcggtctcgggggcggaggcgttggcctcggcggctgcggcggtcttggcggaggtggcgttggcctcggtggctgcggcggtctcactggtccgggtcctcccactggtggtctgtcctgattaggtcctgacggcggtctcactggccctggccccatgggagggcgttccgggcctggccccataggcggacgttccggacctggacccataggcggcctgcctggattatttcccatgggtggtcttcctgggcccggacccatattaggtcgtccacccattcttccatttcccgaaaatccaggttctctccctctcatttcctgagtctccattataattccggacgggttcaccactgattccctataacccaggaactcattctggctattggaaacagactgttcctccagtgattcttctgtggttaaagcctcagcattacctatgttttcagccggaacattttctatgttctgctcctgctccatcaccgggtcatcatcctctgtaaagaaatcatcatcctctgtaaagaaatctacatccagacgtttcatatcctttttgagttctgccatttccatcacagctttatcatgctctgatatgttccacatgcctctgaccttttccgcgccttcggatgcaatcaccgtgtcgcaaattgtatcacaaagccggttaatcattatatggtcaggatactcatcatacatggggctgtttttataatccaatctgtcgcaagcttctgccacatacccctgtagaattcttattcctgacggatacatgcttttcaggtattcaatgtcctgcatctactctcccttttccaattttctcttaccaatatcatatgcaggccaaatccattatgcgccaactttccgcctttttcccaaaataaataaaagaccagataatttccagtcttttacaattgttattgatttaatttttcttaatataaccaagagcctgttccaatgcctcctgttcctcattccccagaacaatatcagtctgccccatatccaccaccttaatatacagataacaaccttctctgctgtggacacagtttaatacgaatccactgtttgtataatctaacatggcaaaggcaaaacttaagtttcctcccattcctttaaaggcattatacttgacaagcccatatttttggaatgaggctctctgattccggttcaatgttcggatggaatccttatttgacctgtcttcggcccttaaatccctgatttcttcaatctggtccagaatgacatcttccagagtttctgcatcttttcctctcataaaatagtcatattggcgatccagccttctcacttttgtcattgttgtaatcgtcaatatcagcaacagaaccactaatatcaataatcccgctattatgtatgcaggatcaaagggaatttgatttaagatgctgttctccatataatatccatctctcctttgtacctagcgaattgattctatcatttctacaatccgctctaattctgcttctgaataatattcaatttcaatgcgtcctttatttttatccttgttgtggatactgacctttgtacccatgacgcttttcatacgttcttccaagctctgatatatcaaagccagggcttcatccttatttttatccttcttctcttccccgttctccgcttcttttgcaaggcgctttacaaggcgctctgtttctctgacactgagcgattcgtccaatatcatctttgctgccttcagctgaagtcctttatcctctaaagacaataaagctcttgcatgaccgctggaaataagattctgaatcagcatttcctgtatctgtccgtccaattttaaaagacgcatggaattggtaatggtagccctgttctttgatactctggctgctatttcctcctgagttaacttgaattctgttaccagacgctgataagccaatgcctcttcaatgggattcaggtcagatctctgcacattttcaatcagtgctatctccatgctttcctgcttattgtactcccgtaacacaacaggtatttcctttaatccggctattttggcagcacgccacctgcgttccccggcgataatctcataaaatgtcccctttttctgaactaaaaggggctgcaaaataccgtatcgtttgatggaatcagccagctcagccagctgttcttcattgaaatcttttctgggctgttctctattaggttcaatcaaagccatctttaccatcaattcaccgcttttgccatccccgttatcagtcacagccgcttttgcttttgcaatctcctcttcactttcctttataacatcttctccaaagatggctcccaatcctttacccaatccttttttagccattacaattcttctcctctgctcattacttctgccgcaagcatcctgtagctctcagcccccgttgatctggaatcgtaaagattaatagacataccgtggctgggtgcctcagccagacgtacatttctcggtataatggttttataaattgttctgttcaaactgctcttaacactttccactacttccagtgacagatttgtccttgcatcatacatggtaaagaccacgccttccaattccaactccggattcaactttcttttaaccaggtccactgtttttaatacctgattaagtccctccaaggcatagtactcacactgtataggaaccagtacagtatctgctgccgtcagtgcgttaatggtcaatatatttagagatgggggacaatcaatgatgatgaaatcatatgtatcacgaacttgatttagacagctgctcagaagtttttccttatcctcgacttcctgaaattcaatttccgctcctgccaggttcatatcagatggaagcacatccagatttggctgtatttccttaataatacattcatttacagatgcctcttcaatcatcatatcataaactgttttatcaaaatcttcctgttccagccccaaaccgctgctggcatttccctggggatcaaaatccaccagcataacatgttgtcctgcttcagccaaacaggcggaaagattaatggccgtagtagtcttacctaccccgcccttctggttggctattgttatgattcgtcccatatgtataaattcctttctcgaaaaaacaaacctttcttcgattacttttacgattataacacaagtcctattcttttcctacggaaaattaggagaaaaggagaattttcatgttttatacaaaaaaatgtttcacgtgaaacatttttaaggcagaaaattgggcatcctaatcctgcagtgtcttaataataatttaatcctctaaccgttgtaatagcccccagcttgtattataatggagaagaatcaaaaaatcggttatataatatgtaatttcaggagactattgaatgaaaaccaggaataaattactgaccttacttatactgtcatccggagctgctgctgctactgctctgattaacaaagcgataaaactttcggcaacgtcccgaaatgtattggaagaaccagaggcattgtgttataagtggcgtttaggaaatatacattatactaagaccggaacaggtaaaccgattctgttggtacacgaccttgctcctgcttccagtgggtatgaatggaagaatctggtaggtaaacttgcggaaacttatactgtttataccattgacttgcttggttttggtcgatcagaaaaacccaatcttacctataccaattatctgtatgtgcagcttctctctgatttcataaaatcagagataggacacaggacggatataattgccagtggttcctctgctgcattgggtatcatggcttgcagcaacagtcctgaattattcaatcagctgttatttataaatccagagagcctcctctcctgcagtcaggtgcccggtaagaatgcaaagctttataaaataattttggatttaccgattgccggaactttaatatataatatagcctgcagtaaacagttcataacaaaggaatttttaactaattactattataatccttactcagtaaagacccgggtaattgatgcatatcacgaatcagcccatttaggagaatctcccaagtccgtctatgccagcttaaaatgtaattatgttaaatgcaatattgcagctgctttaaagaaaattgataacagtatatatctgttaggcggaggtgccatagatgacataggcgaatgtatggaagaatataaagaatacaaccctgctgttgaatatgctgttgtccccaacacaaagttacttcctcatttagaaaaacctgcagaagtatttgatatgattcaaacctatttatcttaaaatataaaatgtttcacgtgaaacatacggttcggacatctactccgaaccgtttttactaccacctctgtacaataaaataaattatttaactgtatatataagaaaggaaaatacaatatgctgcgaattggttgtcatctatcctcatcaaagggatatcgagctatggcaaaagatgcaaaaaagataaatgcaaatacatttcagttctttacccgtaatccacgcggaggaaatgcaaaagccatagatgaaaacgatgtaaatgtttttttaacggaagcccagtctttggacattactccaatattagcccatgcaccttacacactaaacgcctgctcggctgatcctaaattaagagactttgccaaacgaaccatggcggatgatttagttaggatggagtatacacctggaaatatgtataattttcatccgggaagccatgtaaaacaaggaactgaaattggcatacaatttattgcagaaatgctcaatgaaattctttctccggcacagaccactactgttttgctggaaacaatggcgggaaaaggcagtgaagtaggtggggcttttgaagaattgcggcagattcttgatttagttgaattagaaagtcatatgggtgtttgtcttgatacctgtcatatatgggacgggggatatgatatagtcaatcacttagacgatatattgacagagtttgataataaaatcgggttaaaacgtttaaaggccatacacttaaacgacagccagaacccaataggcgctcataaagacagacatgcaaaattaggtgaaggctatataggattagacacatttaaacgaattgtcacacatcctgaattgagacatcttccattctttttagagactcctaatgatttggatggatatgcacatgaaatacaaatgatgcgtgaggcggcagattaactctagttaatcagatattttgagtgcgtgacttcttcatatacaaatataaatgaagtaataagaaggcatacgttgtattttgtcttcttatttttatattcaattatatttaaaagttttatatgtatattaaatattaatagatgtttattgcctattaaaagtgagatgacacatttatattaattacggtatcatgctgactaatgtattgtattaactaatacattttatcgcataatatatagcattatctaacctattatgtgggataatgcattatgtttaataacctattataggcccaacgcattacactaaataactcattacatgcccaatgcattatattgaataactcattacatgcccaacgcattatattgaataactcaatacatgcccaatgcattatattgaataactcattacatagccaacgcattatattgaataactcattataaggccaacgcattataatgaataactcattacatgcccaatgcattatattaaataacacattacatggccaacgcattataatgaataaatcagtatataaccaatgcattatactgaataacttattatagtgaataatgtattatgttgactgtcccatcatattacacaatatattatactcaatgactcattgtaatgtcgaaccaatcatatagattaatgcattatgttaattatacaattatactaactaacctattattctgactaatccatgatgctgaataactcactactctgactaatccacgatactgaataactcactactctgactaatccatgatactgagtaactcattattctgactaaaacaccttatattatttaacgcaataagcacccactcacattttgtcacctaataaattatataatttaatgcatcatataacttagtaaatcctattacttcatatacgctcttccatcttttcaatttttcatcccctgtataataacaaaaaaatatctatgagtttttattacacttaaaattaaaaacaattaaatctatacaagcttataacaataataaattcagtcaagaaaaagggaatgtttcacgtgaaacattcccacatccacttctatcccaaaggctccttagttggcattcctgccttccttggatactttttagaaatccctttcaccttctttattaccaccaaagatctggaagcatctgtaccgggcagcataaatttatctacaaattctagttctcctcccaatattacaaccgccctgccggcagacttcagctcatcttctatctcgccggatttataaggaacaaagaaaccgccaatcttcacaaagggcatacaatactcagacagagaagccaaatttgccacagccctggacacgcacaaatcatacatttccctgtgctctttctgccttcctatatcctcagctctcccatgaataaattccacgttttttaattccaaggcatcacagacttcctccagaaatttaactctcttattcaaggaatccagcaaggtaagttttattcccggaaaagctattttaaggggtatacctggaaatcctgcgcctgttcctacatcaataaccgactttccctccaacagttcttcctcatacactctgctgccgtcacacccatcaccggaatccatcacccgtttcaacaccctaaacagtgacaggctgtcactaaaatgtttggatactacgtctgtctcatctgttatggctgtcaggttcataaccttattcttttccaccagcatttcataataagtaaaaaactgctccaattgcttctcacttaattttatccccagaaggccaagctcccggtccatctgctgtctaaatgtatctgtcatatcagaccctctcactgttttcttgtaaaatgcaccagcagaacagatatgtccgccggtgatacacctgatatacgggatgcctgtccaatggttgccggctgcactttgttcagcttctgaactgcctccctgcgaaggctgtttacctctgaatagtcaaagtcctcgggcagtttcttatcctccagcttcttaaactgtgccacctgctgcatctgacgctttatatatccttcatacttaatctcaatattaacctgttctctgacatcatcaggaagttcaggcctgccttcatccagttccgccagtttaacataatccaattccggcctcttgaccagctctgccagcgttattccggacttcaataaagtgcttccatatttttccaaaaacatttgcacccgatcactcacacctataacagtcttttccagccgtttgatctctgactgtatatcatccatcttccttaaaagatgttcatactcttcatcacttaccaggccgatttcatgaccgatttttctgagtcttatatctgcattgtcctggcgcagcaaaagcctgtactctgccctggaagtcatcatccggtaaggttcatggttttcctttgttaccagatcatcaatcagaacccctatatatgcctgtgaacggtccagaaccacagcctcctgtccacgtatcttcattactgcattcacaccagccatgaacccctggacggccgcctcctcataccctgagcttccgttaaactgcccgcctgcaaacagaccggaaatcttcttaaactccagagtcggcttaagctgaagagcgttaatacagtcatattcaatggcataggcatttctcactatctttaccttttcaagtcccggaaccgtacggtacattgcatactgtacatcctccggcagtgaactgctcatgcctcccagatacatctcattggtgtaaaggccctccggctccacaaatacctgatgacggttcttatccgggaatttaaccaccttatcctcaatggaaggacaataccttggtccggttccctcaatggcccctgaaaacagaggtgaacggtccagattatccttgatgatacgatgggtattttcattggtataagtcagccagcaggaaacctggtctttctggatttcatccggattcgttgaaaatgaaaacggcacaaccctgaggtcgccaaactgctcttccattttagaaaaatcaatgctttttttatccaccctggccggcgtccctgtcttgaaccggaacatctcaattccatgttccctcaaagaatccgtaagatggttggctgcctgaaggccgttaggccctgtaggattgctcacatccccatagatacacctggctttcagatacgttcccgtgcacagtatcacggcctttgcgtaatacactgcgccggaaaatgtctttactcccctgattttaccatcctccgccataatttcagacacttccgcctgacgtatggtgagatgttctgtgttttccagggtccttctcatatgcctgctgtaatcctgcttgtcagcctgagcccgcagggaatgaacagccggtcccttggattcattgagcatcttggactgtatgaaggtcttgtctatattcttccccatctctccgcccagcgcatctaactctctgaccagatgccccttggagcttcctcctatgttagggttacagggcatcatcgctatgctgtccacgctgacagtaaacataatcgtttccatacccagtcttgcactggccagagcggcctcacatcctgcatggccggctccgacaatcaccacatcgtatgtttcttctaaataaggtatcattccgcgttcctcttccatattaaatttccctatttacccatacagaattttgcaaatatctcattgacaacatcatcatccactgcctccccgataatgaaacccagctgttcatatgcattcatcaggtcaatggaataaaaatcctctggcatgctgtcctcaacgcttccctttaccatcagcagactctccagacactgctccagagcttccttatgacgcgcatttgtaatataaacctggtcgttaaaagacaggtcgccgtgataaaagagcttcttgatttcctgctccagcagctcgattccctgttcttctttagcagaaacagggatcaccttatgtccgcaaatctgttccagctcggccgtacccacttccaaatccaaatccgatttattcagcaatacaatggtttttctgtcccggataaattctattatttccctgtcgctttcatccaagggcctggaaccatccaccacatagataattaaatcagcgtccctggctgctttcatcgcccggtccacaccgattttctccaccacatcctctgtatccctgattcccgccgtatccaccacattaagactgattccctgcaaataaatatgctcttccagggtatccctggtagttcccgcaatttcagtaacaatggccctctcctctcccaaaagcacattcatcagagaggatttacctgcattgggcttacccagtataactgtctttaccccttcggacataacccttccgtcatccgcagacaggagcagcttcctcacctcaccaatcataggcaccagatcatccatcagccggctcccatatccatccagtgatatatgttccggatcatccagagctgattcgataaaagctatctgatacagtatccggctacgcagttccttaattttagcggacactgaaccgctcagctggctcacagagctttttaacgcatattcattggtggcgtgaatcacatctgccaccgcctcggcctgtgacaaatccagccttccatttaagaaagccctctttgtaaactctcccggttccgctgttctggctcctgcgtgaagaacagtctccagaatccgcctgaccataagcactcccccatggcagtcaatctccaccgtatcctcagccgtatagctgtggggccccttcatgataatgaccagggcctcgtccaccttctcatcaccgtcatatatatacccataatggactgtgtgggactgggaaaggctcagtctgaccctctccccctttctgttccggaatatggaatcaatcacggaaaacgcctgctctccgctgattctcacgattccgattcctgaattgctcatacctgtagctatagccgctatcgtatctgtcttcataggctctcctcacaatagagcaaaaaggccgtcgcttcagcaacagcctcttaacctgtttcattactgcctgcatccgatcaaccacggatgggcttattcttcttcaccggcagcagtctctgctgatgcatctgaacctgtctgagatgcactgtttccattggtgcggcggttattcctatatccgccggaacggtcggaacgctcaaaacgtccccctttatttctgtcatagcgtcctttacggtcgccggacgctgcctccttcttaagggcaatcaccacatggcggaagggctcttccccttcgcttctggtggtaacatacttatcattctgaagagccgcatgaatgattcttctctcataaggattcataggttcaagggataccggtctcttggttctcttaaccttataggcaatgttcttagccagggtctccagggtttccttccttctctcacggtaattctcagtatccagcttcaccctgagatatccttctgttcccttgttcacaatcaggctcaccagatactgcagagaatccagggtctgccccctcttgccaatgaggatccccatgtcctcgccttccaggtttaaggacagctcctgctcctcctggttatatgcagctgtaatattcacctgcatattcattgccccaaaaatctgagacaggaaatccatggccttatcctcaatggactcttttttcttagcacgaataatggcaggttttgcgccgataccaaggaatcctgtacttcctttatcaactacttcatattccagtttgtcgctggtggtttcaagttcgattaacgcctttgtaactgcttcgtccactgtcttggcagtaactgtaatcatatccatacaaaaccctcctactttttacccttctcatgcttctcattatacttggaaaccatgttagccttagccgccagacttccaggcttggcattatcattatagtacttggtagactcctcaacaatagacttggtcttagcgatcttagccatctgggcctgctctgccttttcttcctttgcctcaatcttcttgagcatctcgtctacattgcccacttttgtaggaggaaggcctttctttgcgcgcttcttgttcgtcttttcaatgttcttctgaaccaggtcgtcaatgtcaaccttattaagataagaattgattcccacctgctggataatggtaaatacactctgtgcaacccagtaaagtccgataccggatgcaaatgagaaacagaagaatacggacattaaaggcatggtcacattcatgctcttcatcatgtttgcgcccggagcatcttcagactgctggggctggttggctgtcatcagcttggtgctgtaccactggcttaaacctgctaacagcggaatgcacagtgctgcaaaggcagtcatcagagtggtgttgtcaaccttattaaaatagttcatgataacctgcaggggtgtgtatgcaatattcagaccaaagaagttctgcatattctcaatggcatccaccactctcacgccggtttccgtaactgcctgtcccacggaagaaaaggcattgaccagtgaatcccactgctgtcctgtcagcttatataataaatcaatgactgtgtttacattggtatagtcaaatctctcacccaccatcttgtgggcctgtgccaggtctgtaaatgcctgggatgcttcatatccgctgggaagcttgcttaccactgcttcataatatacccttacggactgtacatatgcaggaatattgtagatgacgcggtacaacgcgaaaataataggcatctggatcagaagaggaagacatccgcctgtcatggatgtgccgtacttctcataaaccgccttgatttcagtctgcatcatcatggcgtacttctggtcgctttccttgcccttgtacttcttctgaatggctgtaatttcgggctgcatgaccgccatgagttttgatgatttctgctgcttaatggtaagaggtatcatcagcaccttggttaccagggtaaataaaatgatacataaaccgatatttaatattccgaaggtactggtaaaacggaacaataagtccatgatccaccccaggatatcagctatcggccccagaatacctcctgtttttgtcaataatactgcgccagctatactgttcaatacactacctccttcgatctacggaactggatcataaccgccttctgcaaatgggtgacaccggagtatcctcttgcaggccaaccatgtaccttttaacgcaccatacttttttaatgcttcaatggcgtattgagagcatgtaggtgtgtaaatacagtgagttcttactttaaggggcgacagaaacttctggtatccccttaccaacaaaatcagacatcttgccataatcacttcacttcgattcttttaaaatgtgatgcagtccgcacaggtgcaggtaagcaccctccaaatgtttgtaatccgattgtctggcagcgcctctggctaccaggatgatgtttaacccagtctttattctgttattgtttaaacggaaaatctctcttaaaagccttgttatatgatggcggacaacactgttgcccacttttttgctcacagatatgccaatgcggttttcatcttccccggttttcatcacatacatcaccagcagtctgttcgcataggaagttccattcctgtatatcacctggaactcactgttcttcttaacggaaggaaatcgtttcatccgaaactccttacaatcaggttgtcaaaacactccccttttttccgggaaggtaagaaaagaaaaggccacatgatgctgtggcccgtagttcttttgctttaagcttgaaacaattaagcagataattttgctctacctttagctcttctggcagcaataacttttctaccgcctgcagtcttcattcttgctctaaagccatgaactttcgctctctgtctcttcttgggctgaaatgtcatcttcatatccgggcacctcctatcaaaattatgtggcaatgtgaaaacacacatttagactagtataattaaacatcttctcaattatatagaagaaatccgccttcgtcaagcggattttctcaaaaaatcaacaaaaaaccggcaaaaaaggacagtcccaaagactgtcccaacaaaatgtgtgcattgcaaaactacattactatatttagtataaatccgttttccttcctatacgctgctatcctctgatgtcaggcgtcagcttcagcaggattccggctacagccgtcacaataattccggccaccagggcttccggcactccctgcataccgataattcccaatattactccatatacccatttggctgtccagctggcagcggacgcatactgatccccaaacaaaaaataaatcaggttcataaccagaagggtgttggtcagggatccggccacgcctgccgcaaacaatgcggtcccctgcttattcctcctgttcttaagcgttctcataaacagacggtatacataataggccacaaccccaatcagtattcttggaaccaggcagataaccaggcttcccagatttccgtgaaactgtcccatggtaacaaagggtgaaaacacaaaggacgtgggatttggcatgaaggtgttcttccacaaactggtcagaccgaatgtcaaccccaggaatgccccgtatttcggtcccagaataatggctccgataatcacagggatatgaacggtggtcgcattcatgaatccaagcggaatataccctaagaatggcacaaatgccatgattacgataatggctgcaatgactgctgccaataccaggtcacgggttttggataaagtattcattttttcctcctgctactgttcttatgataaagatacaatgcaatgctacaacgtaattataagtaaaaatcacatcagcgtcaatatttcaggcttatgtttccctttctatgcaagactattttcacatgggatcccagattaacataacattatccacaaaatgtggataagttgtggataagtatgggataatacctgctttttccccagcccgatctaaaaaatccagaatttatgaatatttccaccatgtgtaaaactccagttaactttttcacgatttttgtggacaaaagatctttccacactgcttacacagggcatccacccccaattcacaaagttatccacaatattttacacttgtcattgaaaaaatttttactttagtatacaatagatttagattgggcaattctgcaatacagttttaggagacaaaaaatgatcgaaaaaatcaaagaaaactgggacaaaatcttacttactttaaaagaagaacatgaaatatccaatatctcctacagtacctggctggaacccttaaagccgcattcttttaaagacaacacagtaactatcattgttcccgaacagacctttttacaatatgtaaataaaaaatatggatttttattaaaggtaaccatctcggaattccttgaaaaggaatgcgaggtggatttcaaagttaaggagcaaatcgtggaggcggaggaaccggctgcgccccagctgattaaaaacaacaaagcctctgtcagccccgatgtcatacagagtgctaacttaaatcccaagtatacctttgatacctttgttgtaggcggaaataacaacctggcccatgctgccgcccttgctgtggctgaatccccaggtgagatatacaatcctctctttatatatggaggcgtgggacttggcaaaacccatctgatgcacgccatcgcccacttcatattaaagaacaacgcaaaatccaagatactgtacgtcacctcagaaacctttaccaacgagctgattgacgctatccgtaataagaacaacataaccaccacggaattcagggaaaaatacaggaacaacgatgtccttctcatcgacgatatccagttcatcataggtaaggaaagcacacaggaggaatttttccatacctttaacacattatatgaatcaaagaaacagattatcatatcctcagataaaccgccgaaagaaattgagaccctggaggaacgtctccgatcccgctttgaatggggcctgaccgtggacatccagtctcctgattatgagacaagaatggcgattctgcgcaaaaaggaggagatggaaggatataatatagataacgaggtaatcaaatacatcgctaccaatatcaaatccaatatccgtgagctggagggagccctgacaaaaatcgttgcgttatcaaggcttaacaagtgcgacatcaccctggaactggccgaggaagcattaaaggacatcatttcccccaatgcccagagggaagtgacccctgacctgattatccaggtggtttccgatcatttcggccttacccccctggatatttcatcccagaaacgtaataaggaaatcgtatacccaagacaaatcgtcatgtacctgtgcagggatatgacggccactcctctccagaccatcggacgctacctgggaggaagggaccataccaccatcatacatggcgctgagaagataaccggcgacatgtcaaaggatgacacattgagaaataccatagagatactgaaaaagaagatcaatccacaatagaaagtggaatccatgtggacgggctgttgataactgatcttttctgaagggcttgtgaatgacttttaaccacctgtggataaactttaagttttccctcatgaaagtggatggtttccacatcctgttccacaggtgcttgtccttaattatcaaggacttcagacagttttgcacaaacccacagcccctactacggtttctacgaaaattatctatatcttcactcacagatgacacaccgggcacacaattactctgaaaggaagttatcaacattatgaagttaagatttcaaaaagacgccattgttaatggaattaatattgtaatgaaagctgtaccttccaaaaccaccatgtccattcttgaatgcatactcattgacgccagcaccaacgaaatcaagcttacaggcaatgatatggaattaggaatcgagacaagggttgagggagacatactggaacacggcaagatcgcgctggatgccaagcttttctctgaaattaccagaaggctttccagtgaaaatgcatccgttaccattgaatcagatgacaagttcaacacaaccatcagctgtgagaactccgtgttcaatatacagggacgggacggggaagaatttgcataccttccctatatagaaaaagataagtatatctgtctgtcccagttcaccttaaaggaggttatccagcagaccatcttctccatctcaccaaatgacagcaataagatgatggccggggagctgtttgaagtcaatgaaaaccagctgaaggtggtatctctggacggacacagaatttccatccgcaaagtacgtttaaaagaccattatgaggacacaaaggtaatcgtacctggaaagaccttaagcgaggtcagcaaaatattaggcggtgataatgaaaaagaggtgctgatttatttcagcacaaaccatatcctctttgaatttgacaataccatcgtagtatcccgtctgattgagggggaatatttcaggatcagccagatgctttccagcgactatgagacaaaggtatctgtgaacaagaaggaattcctggactgtattgagcgggccaccatactgatccgtgaaaatgacaagaagcctctgattatcaatatcggagataattccatggaactgaagctgaactccagtttcggctccatgaatgcagatttaatgattcacaagaccggtaaggacatcatgattggattcaaccccaagttcctcatcgacgcgctgcgcgtcattgacgatgaagaaatcaatatttatatgatgaatccaaagtccccatgctttatcaaggacgaggaggaaaattatatttatctgattcttcctgttaattttaatgctgccactgtctaagagaggaaaagtatggaaataataaaacttagggaagactatataaagctgggtcaggcgttaaaagcggctggcctggcagaatcaggcgtagaagccaaatatgccgcccaggacggcctcgtatccgtaaacggcgagactgtttatcagcgcggaaaaaaactggtggacggtgatgtggtcacctataagggtgaaaccattaaaatcactaagtagcagactggcaggaaaatccatgattatagaatccatagaactgaaaaattaccgcaactacaaagaactacatatggagtttaatcagggaaccaatatactttatggggacaatgcccagggaaagaccaatatcctggaggcagtctatgtgtgctgcacgtccaaatcacataaaagcgccaaggacagggatatcatccggttcaaccaggatgaatcccatattaaattgcagataaggaaaaacaatgtcccttaccgcattgacatgcatctgaaaaagaacaagccaaagggcattgccatcaatggggttcccatacgcaaggccagtgagctgttcggcatagccaatgtggtattcttctcgccggaggatctgaatatcataaagaacgggccatccgagaggaggcggttcattgatatggaactgtgccagctgaataaactctatgtccattcccttgtacagtacaataaggtccttcttcagcgaaataagctgttaaaggaactgtttttcaggccggaatatgaggagaccctggatgtgtgggatatgcagctggtgaattacggacgtgaggtgattaagttccgaagagaattcattaagcagctcaatgaaatcatacacgccattcatctgagtctcacaggcggcagggaggacatatccatttcctatgaaccctacacccgggaagaccagatggaggatatccttaagaagaaccgggcccaggacatgaagcagaagaccacattgtcgggacctcacagggatgacataagttttattgtaaatggtattgatatacgcaggttcggatcccaggggcagcagcgcacagcggccctgtcccttaagctgtcagagcttcagctggtgaaacaattgagccatgacgatccaatcctgcttttggatgatgtgttatcagagctggacagcagcaggcagaaccatctgctgtcagccatcaaacatatacagactatgattacctgcacaggtctggatgattttgtcaataacaggttccagatagataaggtattcaaggtaattgacgggactgtcatcaacgagaattaatgccgtactagaaagaaaggatgattatataacatgggagagcaatacggagcagatcagattcagattttggaaggacttgaggcggttaggaagcggcctggcatgtatataggcagcacatctgccagaggtctccatcatctggtgtatgagattgtagataatgcggtagatgaagcattggcgggatattgtgattccatcgatgtgaccattaacgaggacaattccatcacagtcatggatgacggccgcggtattccggtagacatccagaaaaaggcaggtcttcctgccgtggaagttgtatttaccatcctccatgccggcggtaaattcggcaacggcggatataaggtatccggcggccttcatggcgttggtgcttcggttgtaaatgcattgtctgaatggctggaggtccaggtctataaggatggaaatatttaccagcagcggtatgaaagggggaaagtaacataccccttaaagattgtgggcaaatgcggtccggaacagcacggcacaagagttacctttctgcctgacaaggaaatatttgaagagacagtctatgattatgataccctcaaaatccggctcagggagacggcgttcctgacgaaaaacctgaagattatcctcaaggatgacagggacgaaaagaaagaaaaggtattccactatgagggcggaatcaaggaattcgtcacatacctgaacaagggcaagacccctatctacgatcaggttatttactgcgagggaaccagggaaggcgtgtatgtggaagtttccatgcagcacaatgattcctataccgagaatatctacacatttgtaaacaatatcaatacgcctgagggaggcacccatctcaccggctttaagaacgccctgaccaagaccttcaacgactatgccagggagaaaaagctattaaaggacagcgaggataacctgtccggcgaggatatacgtgagggcctgacagccatcatcagtgttaaaatcgaggatccccagtttgagggccagacaaaacagaagctgggaaacagcgaggcccgtgcggcagtggacaatattgtcagcgagcagctgacctatttcctggagcagaatccggctgtggccaagtccatgtgtgagaaatccatactggcacagagggcccgtgcagcggccagaaaggccagggacttaacacgccgtaaatcagcccttgacggcatggcccttccgggcaaactggctgactgttccgacaaaaatccggaaaactgcgagatttacattgtagagggagattccgcaggcggttctgcaaagacagcgcgttcacgcgccacccaggccatcctgcccctgcgcggcaagatcctcaatgtggaaaaggccagaatggaccgtatttacggcaatgcggaaattaaggccatgataactgcatttggaacaggtattcatgacgatttcgatatatccaaactccgttaccacaaaatcatcatcatgacggatgccgatgtggacggagcgcatatcagcaccctccttcttacatttatttacagatttatgccggagttaatcaaacagggatatgtatacctggcccagccgcctctgtataaggtggagaagaataaaaaagtatggtacgcgtacagcgatgatgagctgaattccatcctcaaggagattggacgcgacaacagcaataaaatccagcgttacaaaggtctgggagagatggatgcggagcagctgtgggagacaaccatggatccggaacgcaggatacttctgcgtgtcaccatggatgaggaaaccacgtctgaagtagatttgaccttcaccacccttatgggcgaccaggtagagcccagaagggaattcattgaagccaatgcgaaaaaggtgaagaacttagatatctgattttagactgcaaacataaaggagattgaatatggaaccaaatgtatttgacaaggttcatgaagtagaccttaagaaaaccatggaacagtcctatattgactatgccatgagtgttatcagcgccagggccctgcctgatgtcagggacggccttaagcctgtacagcggcgtgtgctgtattccatgatagagctgaacaacggtccggataagccccatcgtaagtgcgcccgtatcgtcggtgatacaatgggtaagtaccacccccatggagacagctccatttacggagcgctggttaacatggcgcaggagtggtccacccgttatcctctggtggacggccacggaaactttggttctgtggacggcgacggcgctgcggccatgcgttacactgaggcccgcttaagcaagatttccatggaaatgctggcagatatcaataaagataccgtggacttcgtacctaacttcgatgaaactgagagggagccccttgtccttccatccagatatcctaacctgctggtaaacggcacatccggtattgccgttggtatggccaccaatattcctccccacaacctgagggaaatcatcggagcagtggtgaagatgattgacaacagggtggaggaggaccgtgagacctccctggaagaaatcatggagattgtaaagggacctgatttccccaccggcgccaccattctgggcagaaggggaatcgaggaagcttaccgcacgggacgcgccaaaatcaaggtccgcgccgtgaccaacatagagaccatggccaacggaaaatccagaatcattgtgacggaacttccctacatggttaataaagcacgtctcattgagaaaatcgccgaccttgtcaaggaaaagaaaattgacggcattacctacattggagatgagtccaaccgtgaaggcatgcggatcaacatagagctgcgcagggatgtaaatgccaatgtaatcctgaaccagctgctaaagcacacccagctgcaggacaccttcggtgttattatgctggccctgatcaataaccagccaaaggtgctgaacctgcaccagatgctggaggagtacttaaagcatcaggaagaggtagttaccagaaggacccagtatgatttaaacaaggcagaagaaagagcccatatattaaagggattgctgattgccctggataacattgacgaggtaatccgcatcatccgcggagccgccaatgtggcggatgccaagaaccagttgatggagcgcttcgggctttccgatgcacagtcacaggctatcgtggatatgaggctccgcgctctcactggtttggaacgtgagaagctggagaatgagtacagggaacttcaggcaaagatcgaggaattgaaggcaattcttgcggatgagaagaagctccttaccgttatccgggatgaaatcatgattatctctgataaatacggggatgaccgccgcacagccattggatatgacgatgatatgtccatggaggacctgattccggacgaggacaccatcattgccatgacccatctgggctacatcaagcgtatggatgtagataatttcaggagccagaacagaggcggcaagggaatcaagggcatgcagaccattgaggaggactatatcgaggaccttctcatgaccaccaaccatcactatatgatgttctttaccaataccggacgcgtgtaccgtctgaaggcatatgagataccggaggcaggacgtacagccaggggaacggctattataaaccttcttcagctgatgccggaggagaagattacggccattatccccatgcgtgaatttaacgatgacaaatatctgttcatggctaccagaaacggcatggtcaagaaaacacctatggtggagtatgagcatgtgcgcaagaacggactgcaggcaattgtgcttcgggacggcgatgagctgattgaggtaaaggcaacagataacagccaggatatcctgcttgtcacacgcaagggaatgtgtatccgtttcaatgagaccgatgtaagggtgaccggccgggtatccatgggtgtcattggaatgcggtttgaggatgacgacgaagtcatcggaatgcagatgcagagccagggagacagccttctggtggtttccgagaacggcatgggcaagcgtactatgattactgagttcagcgcccagaacaggggcggaaagggtgttatctgctacaagtgtacggataagaccggttatctggtaggtgccaagctggtaaatgacggccgggaaattatgataataacaacagaaggcattattatacgcatgacggttgacgatatctccgtgattggacgaaacacctccggcgtcaagctcatgagcattgatcaggattctgacatcaaggtggcaagtatagccaaggtaagggaaagcgttaccaaggacagcaatgtatatgatgaagagtattacgaggaagagaacggggattctgaagaagagagtgaagcagatgtagattcagatgaaacggtttaagattcagttccatgaaaaggctgtcagttgcgacagcctttttatgaaatagtcattatgaaatagtcattgatgtttttgttcccttacctggttacggacaaaagaggagaaccgaacaatatggtaatgtggtcattggcagcagaattattaggacttatcattcatattattctcattttatactatcacgaacggcggctggtatccaacagcaggcggaaaatctatcaggtgtgtctttggatttccgtcttgaccatccttttgaacattgtctgtgtacatatggtcacgaagcccgccgttgtttcccatggagtgaatatgctgcttaacagcctgtatttcattctgtgtgttttgacctgctctgttatggctgtctacatgtttgccctgacactggaacatgtgtatgataaacgttgcctgagaataaccggcagaatcgtccttatactgaatatcatattttggggaattgtaatctggaatcttagaagcggcgtgctgttttattttgatgaaaaccagatatacgtaagaggtcccttaaacaggattggatatttagtcatggcaattgagatgcttatgctggtgctgtgctacatgcgccaccggcgcagcgtcagcaggccggtggtcaggttaatccgcaccatgccggtgatcgcagccatctgtattgtgttccagcatatttataaggaccttcagttaaatggcatgtttatggccattgtcaatatggttatattcatcagcttccagaccaggcgaagtgaggtggacagccttacctttatcggaaacaggaacagcttttttgaggagctgtccctgagaatagccagcaggcagtattttcaggtagttcttgtgtgtctgaagcagttttctcttgtaaatgagaaattcagctacaaaaaaggggatgagtttttatataatattgccagggagctggaccacatactgcccggcgccaaggcattccggtttggaaatgtggagtttgcagtgctgctgccctacgcaacagaagaagaatcaaccggaagtcttaaaaggatacaggaacgctttgaggaacgatgggaactgggagccgtgggaagttatatccaggcctatttcactgatgtgatgtacaggggacaggaatggaatgccacccaaattatagaatatctggaatcgggcattcactatgccaaaaaggaaccgggaggcctgaggcggtttgatataaaattgctggaacagttaaacaggagaaagcggattctggatattatggagacatccatccgccaaaggcggtttaaggtatggtatcagcctgtatttaacttaaaaaccaaccggttttcttccgcagaagccctccttcgtctcagggattatgacggtgaacccgtatcgccgtcggagttcataccgttggctgaagaaactggccttatagacgacctgagctggattgtgctggaggaggtctgcacgcttcttggacagatgcgggacaaaatagattctatctccatcaacctttccatgcagcagttcgaggaccgcagcctttgtgcgagaatccatgaatgcctgaaccggtgcgggctgaatccggatcagttgaagattgaggttacggaacgtgtactgctccaggacatggattatatgaaaaggatgatggaggaaatgacaggagaaggatttgggttttatctggatgatttcggtaccggatactccaatatatcctgtgccctgtctcttccctttgagtacattaagctggacagaagccttttggtacgtctgcccggggacagcaaggtccaggtatttgtgaggagtatggtggagacattccatgccatgggtcagaaaattgtggcagaaggcgtggaagaagaggaacagatagaattactgagacaattcggcgtggattgtgtccagggatattattacggaaagcccatgcctgaagatgaattcagggctgccgtagcaaaaggatgggaggaacaacgaagatgagggagatagccgcagcaaccattacagaagcaataagggacatgtgtattgaggccaattacggactggccccggatatgagaaaggtctttgaaaaagcagtggaggaggaggagtcccctctgggccgccaggttctgggccagcttaaggagaacctgaaaatcgcaggagaggataaaatacctatctgccaggatacgggtatggctgtggtatttatgaaaataggacaggatgtacatatcacagggggaagactggccgatgctgtcaatgaaggcgtacgtcagggatatgaacagggatatctccgtaaatctgtggtgggggatcctatagagagaattaatacaaaggacaacactccggctgtcattcactgtgaaattgttgatggggaacagattgacataacagtggctcccaagggatttggaagcgagaatatgagccgtgtgttcatgttaaagcctgcagacggtctggaaggggtaaaagaatccatccttcaggcggtgagagaggcaggccccaatgcatgtcctcccatggtggtgggagtgggaattggcgggacctttgagaaatgtacccagatggcaaaacacgccctgaccagagatatagaggataagcctgggaagcagtgggtcagagatctggaagaggatatgttaaaccggatcaatcagtcaggcatcggccccggggggctgggagggagggtaacagcctttgccgtgaacatagagacattcgccacccatatagccggccttccccttgccgtaaacatatgctgccatgtaaaccgtcatgcccgcagagtactgtaaaactgtaaatgagaaaggagtcctgttcagatgaatcgacatatgaatgtaccaatgacaaaagaggaagctgcctccttaaaagcaggagattatgtatatcttacgggaaccatttatacggccagggatgccgcccataagcggatggacgaggctcttgacagaggggaatcactgccgtttgatatagagggcagcatcatatattacatggggccgtccccagccagggaggggagagccattggctcagccggtcctaccacagccagccgtatggataagtatacgccgcgccttttggacctgggtatgggggccatgataggaaagggaaagagaagcaaggctgttatggatgccattgtgcgcaacggagctgtttattttgccgccgtgggaggagcaggagccattctgtccaaatgcattctttcatccgaaattgttgcatatgaagatttaggcacagaggcagtgcgcagactggccatacaggattttccggtggttgtggtgatggatgcccttggtaataatctatatgaaacagcagtaaaggaattttgtactctgtagcgaggggatatgaagcggattatatatatggtactcatgaatttactccatgcaccgatatggtttttcaccatttcgcgtatggcaagagaagaagatacaaggacggctgctgaaaaatatgggtatatatcggagatggtaaagaggattaacagaaggggcagggttacggtcactgcaacgggaacagagcatattccgtctcaggacggatttatactgtttcccaatcatcagggcctgttcgatatgcttgccctgttttcaacctgcccaagaccgctgtctgttgtaataaagaaagaggcctccaactggattctggtaaagcaggtattgggggcaaccaaaagccttgctatggacagggatgatataaaagaccaggtgcgcattataactgaagttaccaaacgggtaaagtcaggccgtaactttgttatatttgcagaaggccaccggagccgcaacggaaatgaaatactggattttaagagcggtacatttaagagtgctgtaaaagcaggctgccccattgtacctgtggccctggttaattccttccgtccctttgacatgaactcgttaaaaagggaagaagtgcaggttcactatatggaacctattcttccggatcaatatatgggaatgaaaacctcagaaatagcacatcttgtgcatgacaggatacaggaagaaataaataaaaatctcaccaaaaatggcttgacaagctaaaatctatttagtataatggtcaatgcgtctgaggacaagcatgtcaaaagaagcaatcatatggaaaatatcaattcggagaaatactcaagaggccgaagaggcgcccctgctaagggtgtaggtcgggaaaccggcgcgagggttcaaatccctctttctccgctccattttccaaatgattatttttttcactcttgtttgtaagataaaaaaaagttttaaaaagttgttgacaataaacgacagttatggtatagttaatacccgctggacaaaaacaacagcgactgatgattgcgaaaagccatttggctgaaaacaaaaatcaaaaaaagttaaaaaagttgttgacaaacacaagcgactgtgataagatataaaagttgctgctgaacaagccaacaacaaagaaccttgataattgaagattagacagtatgtaaaaccctgaaaattctaaaaacaaaaggtctggtttaggcctttggatttgagaaaattcagaacaaaaccaagtaatgaaggttaaagataactagccaagctaagtagtctgaaacctggaatcaacttttaaacatgagagtttgatcctggctcaggatgaacgctggcggcgtgcctaacacatgcaagtcgaacgaagcaattaaaatgaagttttcggatggatttttaattgactgagtggcggacgggtgagtaacgcgtggataacctgcctcacactgggggataacagttagaaatgactgctaataccgcataagcgcacagtaccgcatggtacagtgtgaaaaactccggtggtgtgagatggatccgcgtctgattagccagttggcggggtaacggcccaccaaagcgacgatcagtagccgacctgagagggtgaccggccacattgggactgagacacggcccaaactcctacgggaggcagcagtggggaatattgcacaatgggcgaaagcctgatgcagcgacgccgcgtgagtgaagaagtatttcggtatgtaaagctctatcagcagggaagaaaatgacggtacctgactaagaagccccggctaactacgtgccagcagccgcggtaatacgtagggggcaagcgttatccggatttactgggtgtaaagggagcgtagacggcgaagcaagtctgaagtgaaaacccagggctcaaccctgggactgctttggaaactgttttgctagagtgtcggagaggtaagtggaattcctagtgtagcggtgaaatgcgtagatattaggaggaacaccagtggcgaaggcggcttactggacgataactgacgttgaggctcgaaagcgtggggagcaaacaggattagataccctggtagtccacgccgtaaacgatgaatgctaggtgttggggggcaaagcccttcggtgccgtcgcaaacgcagtaagcattccacctggggagtacgttcgcaagaatgaaactcaaaggaattgacggggacccgcacaagcggtggagcatgtggtttaattcgaagcaacgcgaagaaccttaccaagtcttgacatcctcttgaccggcgtgtaacggcgccttcccttcggggcaagagagacaggtggtgcatggttgtcgtcagctcgtgtcgtgagatgttgggttaagtcccgcaacgagcgcaacccttatccttagtagccagcaggtagagctgggcactctagggagactgccagggataacctggaggaaggtggggatgacgtcaaatcatcatgccccttatgatttgggctacacacgtgctacaatggcgtaaacaaagggaagcaagacagtgatgtggagcaaatcccaaaaataacgtcccagttcggactgtagtctgcaacccgactacacgaagctggaatcgctagtaatcgcgaatcagaatgtcgcggtgaatacgttcccgggtcttgtacacaccgcccgtcacaccatgggagtcagcaacgcccgaagtcagtgacccaactcgcaagagagggagctgccgaaggcggggcaggtaactggggtgaagtcgtaacaaggtagccgtatcggaaggtgcggctggatcacctcctttctaaggaagaagaagtaagggttttatatactgtctagtgttcaatcaagaggacacaaagaatttccggtgccgatgcgcttaggggaaacacccgtacccatcccgaacacgatggttaagacctaagcggccgatggtactatgctggagacggcatgggagagcaggtgggtgccggattcattaaaaaaactcactcgaaagagtgttttatatagaacagacatgttccaatgggtggaggtaaaagcgaaacctgtgttttaaagaacgtgttaacctacgtcagcagggaagtgctgttccatataactggtttttaccagtgattagtgaattcgagcaaatcgaattcgctaatgactgataaaacatcagtcacatacgtaccttgaaaaccgcatattgaataaaaatgaattgtatattctaaatcagaatatcaagacatccgaggccatacaagagattgtatggaaaaacaaacttgtaaatgcgaaagcgtttatgaaaacctagaaccaaagcgtccaacgctatggacgtttagaggacccgcagcaacccgcggcgggaaatcatttggttaagctataaagagcgcagggtggatgccttggcactaagagccgatgaaagacgtgataagctgcgaaaagcttcggggaggagcaaatatcctttgatccggagatatctgaatggggaaacccggctgagcaaacctcagtcactgcatggtgaatccatagccatgcagagggaacccggtgaactgaaacatctaagtagccggaggaagagaaagaaacatcgattcccaaagtagcggcgagcgaaatgggaagagcccaaaccagcgtgcgtgcatgctggggttaaggactgcaaacgtgaaccgatttgttagtggaactgtctgggaagtcaggccagagagggtgaaagccccgtacacgaaaacaataggaagcagcaggatccagagtaccacgagacacgagaaaccttgtgggaagtcggagggaccaccctccaaggctaaatactccttagtgaccgatagcgcatagtactgtgaaggaaaggtgaaaaggaccccgggaggggagtgaaaaagaacctgaaaccctgtgtttacaagctgtggaagcacgttaaggtgcgaccgcgtactttttgtagaacggtccggcgagttgccggtactggcaaggttaagagcttaaggctcggagccgaagggaaaccaagtctcaaatgggcgtcaagtcagtacaggcagacccgaaaccgggtgacctatccatgtccaggttgaagcggaagtaaaattccgtggaggaccggatccacatccgttgaaaagggtgggaatgaggtgtggataggggagaaattccaatcgaacccggagatagctggttctcctcgaaatagctttagggctagcctcatattagtttagcggaggtagagcactgaattcctaagggggcgtcaaagcttaccaagggatatcaaactccgaatgccgcataaatgatgtatgggagtcagactgcacgagataagttgggtagtcaaaagggaaagagcccagacctacagctaaggtcccaaagtgtgtgttaagtggaaaaggatgtgggatttcaaagacaactaggatgttggctcagaagcagccacacattcaaagagtgcgtaatagctcactagtcgagaggtcctgcgccgaaaatgtccggggctgaaacacaacaccgaagcttaggaatgtatgtaagtacattggtagaggagcattcttagtgcggagaagcggtaccgataaggagccgtggagcgctaagaagagagaatgccggaatgagtagcgagatggaggtgggaatcctccaggccgaatatccaaggtttccagagtaaagctgatctgctctgggtaagtcggggcctaaggcgaggctgagaggcgtagtcgatggacaacaggttgaaattcctgtaccatgtatcatcagaactgtggggacacagaaggacaacacatcccgggaatgggaataccggggcaagcgaggtaggagtacggttggcaaatccgccgtgcaatccgaagacgtgacgcgcagcgaactaaagtagcgaagtgtgtgattccggctgtcaagaaaagccgctattgtgtgatacatgcccgtaccgtaaaccgacacaggtagatgaggagagaatcctaaggccggcgggagaagcattgttaaggaactcggcaaaatgaccccgtaacttcgggagaaggggtgccacagagatgtggccgcagagaataggctcaagcaactgtttagcaaaaacacaggtctatgcaaaaccgtaaggtgaggtatatgggctgacgcctgcccggtgctggaaggttaagaggagaggttagcgcaagcgaagctttgaatttaagccccagtaaacggcggccgtaactataacggtcctaaggtagcgaaattccttgtcgggtaagttccgacccgcacgaaaggcgtaatgatttgagcgctgtctcaacaatgcacccggtgaaattgaaataccagtgaagatgctggttacctgcgccaggacggaaagaccccatggagctttactccagtttgatactgggattcggtattgcatgtacaggataggtgggaggctttgaaacatggacgccagtctgtgtggagccaatgttgggataccacccttgcgatattgggtttctaacctgcgcccgtgacccgggcgggggacaatgtcaggcggggagtttgactggggcggtcgcctccgaaagggtatcggaggcgctcaaaggttccctcaggatggttggaaaccatccaaagagtgcaaaggcataagggagcttgactgcgacaccgacgggtggagcaggtacgaaagtaggacttagtgatccggtggtatgaaagtgggattgccatcgctcaacggataaaagctaccctggggataacaggcttatcactcccaagagttcacatcgacggagtggtttggcacctcgatgtcggctcatcgcatcctggggctgtagcaggtcccaagggttgggctgttcgcccattaaagcggtacgcgagctgggttcagaacgtcgtgagacagttcggtccctatccggcgcgggcgtaggatatctgagaggagctgtccttagtacgagaggaccgggatggacagaccgctggtgtacctgttggcctaccaaggccatggcagggtagccaagtctggacgggataaacgctgaaggcatctaagcgtgaagcccccctcaagatgagatatcccatcgcgaaagcgagtaagaccccttgaagacgacgaggtagataggttagaggtggaagtgcagtaatgtacggagctgactaatactaatcggtcgagggcttatccagaaggttaagggaaaaaggtttgtgaaacaatcggaattcaatatgtggttttgaaggtatgtatatgcctttaatggcccggtggctcagctggttagagcgccgccctgtcacggcggaggtcgacggttcgaacccgttccgggtcgtttttctttcatatacacgctgaaagagatacctattggggtcttagctcagctgggagagcatctgccttacaagcagagggtcacaggttcgagccctgtaggccccatttgagtattttttacagaaaagtgtatatactaattcaataagggcgaattcccgagtggccaaaggggacagactgtaaatctgctggcaatgccttcggtggttcgaatccaccttcgcccatttaaaatgttagttgacaaaacattttaaaccatttataattatatattagcgcggggtggagcagtctggaagctcgtcgggctcataacccgaaggtcgtaggttcaaatcctgcccccgcaattttttttgcaaaaacttaaccctatgggcgtgtagctcagtcggtagagcacttgacttttaatcaagttgtcccgggttcgaatcccggcacgctcattgatgcccagatagctcagttggtagagcagaggactgaaaatcctcgtgtcgttggttcgattccgactttgggcatttagcacttatccttaatggatgggtgctttttttattgtcaaaaagtacgtaaatacgttattttagggaatttatccacaaagaatttattttaaatagatattatcaaggtgggaattgcagttttcaacagcaatcatttcatgtgcaaagtgttcatatcttttagtggtttctatactttcatgccccattaaaatgctcaaatcgtagacaccagtatttcccgttctgcgatagttatcaatattttggaaatataccccaaggggactaaacggtctttgcaacccttgccagtgacttgtaacgcaccacggtcaaaatccagccccttttttactaatgtgcatattcattctgcctaagcccagaacccaacattaaagcgattatagccttatttctggcagtcagccaagggacagagcattttgcagaatccaataaatattgtatctcagcagaagaaagcacatggacattctttttgggaggtttaggaacctttatctttaccgggtcaaagctaagaccatattcagcatgcacccatctaaggaatatacgggcatttctgacatatgtagaaatagtggccttggaaagtgaacggtgaagcaataccatgataattggtacgtttagcagacttaagggaatcacgcaattggacacaaaaatatgttgcaagctatttatgtgtaactcaaaggtcatatggacattacgaaaatggcactcgttcactgcctttagagcatttgataaaactaaccgagttatatggtgtaagctctgattatatattaggtataacagatgaaaaaaagccgtattccaaacccaagaaaaggaagtattatgttgtaaagatataatcaaatatagtatgataggtttgctgtctaccctataccgcacagcggaaagggggtgtgcaacatgtccgatgtattaaacttcctggttgcggttatggcaagtgtagctggttactacatatgcaaatggttagaccggaaccgtaaagacagctaaccaaaaagaagccccaaagactggtactctttggggctttgtttagtgcaacatgtgtactaaacttcctggtattattatattataccaatcctgccaatatgtcaagtaaccttaaatggcttaaatatactgccttttaattaagttgttccgggttcgaatcccggcacgctcattgatgcccagatagctcagttggtagaacagaggtctgaaaatcctcgtgtcgttggttcgattccgactttggtcatttagcacttatcttattgataggcgcttttttgttttattgtaagatttccttcattgtaaaaatgtcggaagtctgatagtataaataatgttttaagaatttgatatgctattaacaaatcatacaacaaatgataccaggggaaaataaatgagcagacggcgtaaaaaaaaggactcaccaattaagaccgtatttttgattattatggcagccattattatgatagcagccgtatatgtaatcatgtccgtggttgggaaaatccggtcggattataaaaatctggatttcactacagaggaaaaggagatgccttctatcaccatagatacaaaggatgagccaaaggccggatggaatgagacagataaaggttggatgtattatctggatgaaaaggaatatgtgacagaccagtggaaggatatagagggtttcctctattattttgacagtgatggtattatggctaccggagagttgaaacaggaaggtcagacatatacctgccatgatacaaagggatatctgaaaaatatccagattgatccggactatgtacctgaaagcactggtgaaaacctggacagtcttgtgaggaccaatgcattctggtgttatctgagggctgaggacacaggactttttaagaccattctgtaccgcaagacagtggagaacaaggtagtggtgctgggaggggagactgccccagaaaagaccacaaggaattctatgcgtgcttacggcgattacgtatatttcctgcctaaggtaaaggaaagccagaaacagggcctttctgaggccgagagggggctttgtgataagctgttcaggatgaggccgggaagtgataccaaagaattgatagctgagaatgtggatggctatatggtactgggtgatattatctattactctcagggcggtaaaatttatcagactacctcgggcacagaggttgctaccggggaggccaggtattcggtggttataaaagatggaaattgttatctggtagatgacatgggaaatcccgcagtggctgaaagcggcagcagcgtcagcataggagaccgggtttacaggattgaggaagatggaaagataaaatatgtaaaacacggccaggtaaccattgacggaaagacctattatctgggcggcagcggaactaaatcttctgtctgcgtaaaaagcgatgggagcgatactgctgttatcagggaaaattatggtgtacagagctattgtattgtggataaccagatctactacagcagttatgtggataaaggtaccggcggagagtggtacagccagatttttaaagctggtttggacggacagaataaacaggcagtgtcagagcgtttccctggtgtcatgcagaatatgtattactatgaagacgagggccagatattcggggaatacaatcctgctatatggaaacaggcgtatggaaccgttgtcatgatagcaagagatggaggaatttatcagatagaggatgcatccgcacgtacaggtaagcatgtggacggaaatgacatgctggaaattataatggccagggacggcaaggtcatctgcctgtggcatgattgccaatgggagagaaacagcggaataaccagtatcctgtggagtaaagccattgagctcaatgcaggggacagacgcctgattgatatggttccctcaacagaatccgcagagagcagtgaagcccaggagccaggtgacataatccagccaattgagactatgccgcctgcttccacagagactgtctcaccggtggaaccttctatcaataacgaccctgtcatcagcacggagggacctcatacagatacagctgtgcccacggttccggcgcctgctcccacggttccgccggtgacggaaccatctgctgaggtgaagatagtgccgttgggataaagagggaaaccggtattagcggggttcgtcctcatcaaaatctactatcacatagaatccccgggaattttcgcggatgtcttttacaattccgtattcggatttaatgcggtaacgggcggcgaagcagccggacatggctacggccggatcaatgatatagctgtagctgctggttccttcccgctcgattatttttactttatctcctttatttacaagtccctggcgttccattttaaattcaatggttctcattgatacctgcttcctttcctacttcatcacataccatattgatataatcagataaggtactgttctggcagcctacaatgtaatgattgcatcggttgaccggaatcagtatcttatatgctttactgatgcctatggctgtggccatggcaggcgtaatctcccccaaaagggaattagccatgacaattccgatagggccgatgatgatatctgcgtcctgtgcattgacaataaccggattctcaccagtagcgccataggtggcgcctgctttcagcatggcagatgtggcgatgctgtttgttccgatggcatatgtctccaggcctggaaaacgctttttcagctgttcgataactgatttacccatcttcccgccctgtccgtctatgatgacaattttcatggattcaccttcttttcttttgtgctgggtatattttaacagaaatacaggggaaagtaaatgttatccacagatgggcggagtatgagggtggaattgtggataaagatgagcggaacaatcttatatgggaataaaaagccttggaagccggtcttgacaaatcagagtcaggtgatataatcaagaatagcaataagcagcaaaggcattgagggaaacagtagtcagtgggaagtatccagagagcaggccggttggtggaatggccgcataccaaagattgacgaataccagtcctgagccgcgtcagggatgtccggacatgtgttacagcataaagaaggatgggaaatggcgccgtaccccgcgttaagggataaatgagtgaaaatcaaggtggaaccgtgtgaatgcacccttggacataagaatatgtccaggggtttttattttcccgttttttacacaggattccggcagcggacatattcagaaggaatgtttttcagcagaacagccggaatcatcatatcagaataacaccaaagagatggagccttaaatggcccatagaagaaaggagattcgtatgaagatcattttaccagacggaagtgtacaggaagctgaggatgaattaagggccatacgccatacagcatcccatgtgctggcacaggcagtgaaaagattgtatccggatgcaaagctggccattggaccggctattgatgacggcttttactatgattttgacagggagggaggcttcacgcctgaggaccttgagaagttagaggcagagatggctaagattgtaaaggaaaatcttccggttaagccttttgtgcttccaagggctgaggctgtcagattcatggaggaaaaaggcgagccgtataaggtagagcttatcgaagatctgcctgaggaggagaccataagcttttaccagcagggcgaatttgtggacctgtgcgcaggaccccatatcatgtatacaaagggtgtaaaggcatttaagcttacgagtattgcgggcgcgtactggcgaggcagcgagaagaacaagatgcttaccaggatttacggaaccgcgtttgccaataagacagacctggagagctacctgaccatgatggaggaggcaaagaagcgtgaccacaggaaactgggcaaggagctgggtctgttcatgtttgcagaggaaggacccgggttcccattcttccttccaaagggtatgacgttaaagaataccctgattgattactggcgcgagattcactacagggacggctatcaggaggtttccactcctattattctgagccgtaagctgtgggagaattcaggacactgggatcattacaaagacaatatgtacaccacggtcattgatgaggaagactatgctgtcaagcctatgaactgtccgggaggaatgctggtttataagaatcagccccactcttaccgcgacctgcctttaaaggtaggcgagctgggactggttcaccgccatgagaagagcggacagctccacggtctgatgcgcgtgcgctgctttacccaggatgatgcccatatctttatgagggacgaccagattgaggatcagattaagggcgtaacaaagctgattaatgaagtgtatacacagtttggctttgagtattttgtggagctgtccaccaggcccgaggattccatgggttctgacgaggattgggagatggctacaaacggcctgaggaaggcgctggaggacatgggccttgattatattgtaaacgagggcgacggcgcgttctatggtcctaagattgacttccacctgagggattccctgggcaggacatggcagtgcggtaccatccagctggatttccagatgcctcagaggtttgacctggagtacacggctgaggacggttccaagaagcgtccaattatgattcaccgcgtatgcttcggatccattgagcgtttcatcggcatcctgattgagcactttgcaggcaagttcccggtatggctggctccggtacaggttaaagtaattcctgtttctgagaagtctatggattatgcaaccggtgtatatgaaaaattaaaggctgccggcatccgcacagagctggatcacaaggacgagaaggtaggctataagatccgccaggcacagctggagaaggttccatatatgctggttctgggtgagaaggaagcggcagagggagcaatcacggtgagaagccgggataagggcgacctgggtgctgcgggactggatgcgtttattgaagatattaaaaagatgattcagacgaaagagaaataacaaccgcaaaaaggcgtttaagataaggttatatccgtatcttaagcgcctttaagcatatatgactattggagaaagggaacctatgccatgggaacagtccgctcatatccatccgcaattctgagcagtacagcaccggatgtattcccggcaagtgtttctatggttaatgctgtaatatcatcgacaacacatttgtccgcttttatacagacatgtattgcattgacgagacagttttgggatactttgtttttgccggctgcctgaatctcacggtagatttggtttgcaatgcctctggcaatggtctccttttgcttcacatcatctttccaggttattttaagtttcacaccgtttttttatatcatgagtttaattccgtaccaggcttccatccgtcctcacggtcacaacctgccacggaatgaatttcccgctggcctggagggcgcgtttcgcggcattttcaataccgccgcagcatggaacttccatgcggacaatggtgacatccctgatatcattgagacggatgatttccgtcagcttttcagagtaatccaccatatccagctttggacagccgatgagtgtgatgcggccggctataaagtcattgtggaaattaccataggcaaaagcggtacagtcagctgctatcaaaaggcgggcatccttaaaatagggagcctggacaggagccagcttaatctgcacaggccactgggtcagacggctttccggacattctctgtgaaggggggcgtcggaaggggacaagttccggttctggtgcatacgggcttttacggctgcctcatcataggcagctgcctccctttcctcaaaggtaatggcccctgtagggcaggtgggcagacagtcgccaagtccatcgcagtaatcgtcctttataagcctggctttgccatctaccattgcaatggcgccttcatgacatgcgtcagcacatgcgccgcatccgttgcacaggtcttcatttatcttaataattcttctgatcattcttttatcctcctcgttatgagtactttagccaatggatgttatgatagaagtatacaatgaagaggacggattgtatgttgttacaacaacatttcatatgtggatttttaccattttttaaagcaggcatgacagcgggaagataatggcgatggccggaaggatatttaagaccttggtccgtttgatgcctgcaatttttaatcccactgccagggtgatgatcccgccgcaggccttaaaattagccagcatggtatcagtgaccagggggagtatgtaggaagctcctccaaacagaaggatgcccacggcaaattgcggaactgcgataaagcctaccagatagcctgcggtggttccgaagatgatggctgtaaagaaatccatgacagccttggcatagaggatggaatggtcgccggtcatggctgagttcatggcgccgaataccccggtgccgctgaagcagaacaggataatcatgctgattaatacatccatctgttcgtcatccaggttcacgggaagtttttgctccagcttgtgaagcccctttaacagattatcctccaggttcagaagttctcctatgaccgttcccacgataagggccagtaccacggctgacagactttttaacatgataataaggctgattcccatggtgatggccgacagaccaaagatattgggcagggcctcttttaatttctgtggaaaataatttttaaaaactgcccccaggatacctcccaggaatacggcagcgcagttggttatgattccatatggcatagggcatttgtctccttgtttgattttagatgtaatgtttactttgttggtttcccggtatcagcatgattttccattctttgatataattcctggaacatttccataaatttaccaaccttttcagtagggatatcctgaaaggtatattcctccagtctggcaaatgcctccgttacctcccttcccatttcccttccgcggtcagtcagaaagatataaaaagatcgccggttgccgtccgttcttctgcgctcaataagggattttgcctccatgccgttgagtacggaggtgagggtagcggcttctatatggcaggcatttgctatttccttttggtttgccccatcgtgttccatgagataatccaggaccttgggctgtccgggagtcagcccggtatggtacagctccgccatgagctgcttcagatatatggcatggcctgccattaaaagatagtgaaatgtcatgaatatacggaccgcctttcaaaatatttagaatgctaatgattataattcaaactatatactgtgtcaattggattttgcctatgctgccgatatttattactttccccgtactttacaatcttcttaaattttatcatatatcaatattaatttatcgaatatcaataaaaagatattgaaaaataatataaatggtgttatattccaagtaaggaatctcaagtaagaaattccaggtgaggcttttaccagggtaacccgcaagccccacaagcccttttgcagggcacataagcaatacagaaaggtggatttagtatgaatatgcgtttggtaaggtttacaaaagggcttctggacatcatgttttatgtggggatggctataacagcggcaattccggttattttccattatgtaggtatgtatatagagaaattcaggacctactacgtggttcagtgtgcgctttacatggcgtccggggtgctggctcttttgctggtgctggagctgcggcggatgtttgcaactgtgctggcagatgacgcatttgtgatggaaaatgcagcgtccttaaaacgaatggggaaatgcagctttctcatagccgttctgtctgttctccgcctttttgtggcgtttactccggccacagcagtgattattattgtgttttcaatcgcaggccttttctgttttgtgctttgtctggtatttgaacaggcgatccgctacaagcaggaaaatgacctgaccatatagacagggaggaatgacatgggaattgtaatcaatctggatgtgatgatggccaggagaaaaaagggcctgaaggaattgtctgcggaagtggatattaccatggcaaatctgtccatcctgaaaaataataaagcaaaggcaatccggttttccactctggaggcgatctgtaaagctctggactgccagccgggagatatattaagttatgaacaagaggaaggagaggatgagaatggacgataagatgtatttgaccgcaacagcccagggggaagtaaaggtcacagggggacgggcagaggagaaattaggcgcacgtctgcagcggattggaaaggagtttggttttttcggcgttctcagcattttttatggtgtaagcgccagcttctgcctgtttcggaatcctctggggattacagtccctttgtttgtggcggtgacctatggggctgcatttctgatattcagaaaaatgggggtgcccatcaagaaggattcttatttgctggcagccgtatcccttttgattgggctttcggcctgttttacgggtaatatggcagttggttattatatgaaccgtctggctctgattttgctgttctgtattttcatccttcaccagtgccatcaggataataagtggaatataggaaaatacatggcttccattgttctgtatctggctcaggccgtggggatggttctctaccccttccgccatttaggggaatatatactgtcccttaaggataaacggagccgtaatgtgttccggctgctggcaggcgcctgtgcggctgtaccggctgtcatattcctgtgtgtgctcttgtctggggctgatatggtattcaggaacatgctgtcagttgtcatttcaaagttcctcaatccggttacactgttcatggtggtgatccagaccgtattctggtcactggccatgtactgtctggtctgcagtgcctatggaggaagcatcagcgacgggatggtcaatgtacgcaggcattcgccggtggcagcggtcagcttcatggccatggtgggtttggtttatctggtattctgtgtcatccagattgtgtatctttttatgggaaagggcagcctgccggaggggatgacctattcccagtacgccagacagggatttttccagcttctctttgtggctgtcctgaaccttgtgatggtgctcatgtgtcttaagtattttcgggaacatgtgctgttaaatggatttctgcttctggtcagcctctgtacctatgtgatgctggcatccgctgtgtatagaatggtgctatatgtacagcagtaccagctgacatttctcagaattctggttctatggtttttggccatgctgtttgtgctcatggcaggggtgataattcttattttcaatcatgagtttcctctgttccggttctgcctggctgtggtatcctccttttatctggtatttgcctggatgaggccggactatataacagcccgctataatgtggcgcacagggacagcattgccggggtggagcagagcgactttatgcgcctttccacagatgccgcaccggccctggagggaatggaggattccgaaataaaggagcgccttctgtcctggtatgccaaaagatacgaggtttgggatgatgggaaccccatgggactcaggacctttaatttttcagtactgaaagccagaaataaactctgagaatttctctatgaatcccatggtttttcatgtatactatgaaaagaaaaacgcggatgatatggagctgacaatatgaaaatagcagtgatgggatacagcggtgcggggaaatccacactggctaagaaactgggcaggctctacgactgcccggttctgtatttggacaggatacaatttgagcccggatggaaagagagaaactgggaagaagcaaaacgtatggcagaggaatttttgaatgagaatcaggacacgggctggattattgacggaaactacgctaaattctgccaggaacggcgtctggaggaagcggatctcattgtatttatggactataccagaagaatctgcctgtggcaggcggtgaaacggtatctggaatacagggataaaaccagggagagcatggcagagggctgccgggagaagattgactgggactttgtgaaatggattctccgtgacgggagggatgagaaccacagctatcggtccattaaagccagatatccccataagacgctggtggtccgcaaccggaaacagctgaaggacagcatgacaaggctgatattgagaagccgtgagaggacattgggatgagacaggaagaacttctgattaaccgcctggccgcatatgccaggtcggacatgtatcccttccatatgccggggcataagcgcaggacggggccggaggattcctttatgaactcctgcgtggactcctttacaaatccctttgcagtggatataacggagattgaggggtttgataatcttcaccatccagagggcattttaaaggactccatgaaatgggcggcagatgtctacggggcggaccagacctattatctgattaatggaagtaccggcgggatactggcagcagtatgcggatccgttcccagaggcgggagaatcctggtgagcaggaactgccataaatccgtgtaccatggaatctgtctgaatcagctgaaaacctcttatgtttatccacaggagatagaaggattggggatacagggaggaattacggctgaagatgtggacaggatgcttaaccggtatatggatacacaggccgtacttatcgtatgcccgacctatgacggaattgtatccgatatagaggccattgcccggattgtacacagggccgggcttccgttgattgtggatgaggcccacggcgcccatttccgctatgacgccatgtttcctgtgtctgccctggacctgggagcagatgtggtgattcagagcgtccacaagacccttcccagcctgacccagacagccctgctccatattaaatgcaaccggccggacggaggatgctatgcagacagggagcggattgaccggtatatccatatggtgcagagcagcagcccttcttatgtgctaatggccagtatagagaacagtatataccagatggaacagacagatatggcgccctatgggaaacagcttcacaagctgcgccggagactgggtcagatgaggcatcttcgtcttgcggatacagggcttataggacaggccggaatcagggacctggatatctccaaaatcgtggtgtctaccaggggaacctgcctgtatccggcagaagatggattgaccggatttacaggcgcgcagctggatgacattctgcgcagagaatatcacctggagatggagatgtgcggggcagattacgtgacagccattaccacggttatggacagcggggaaggcctggagcggctgggggatgcattgaccaggattgacagccaactgacggatgccggttataaaccagacgggcgcagcgggaaccagaaaagtgtatacagtatgcggtgcgacacggccatgtccatgggagaagccatggaggagaacatggcgtctgtcggtctggaggacagcgcagggtgtatttccggggagtttgtctatatttatccgccgggtatccccattgtggctcccggggaatggatcagcagacccattctggaagtgatcctggaatacagggataaggggcttccggtacaggggcctgcggaccaatccctaaggaccatccgggttgtgcagaaggattgattttatattaagacggaatgagaactgactgagattagaaagtgcagagagaatcatgggaaagatattttatgtcatgggcaagagtgcctcgggaaaagataccatatataagaagctccacagcagaatgccggaacttaagacagttaccatgtataccaccagacccatacgggacggagaacacaatggggtggagtatttttttgtggacccctcctatctggaccagtgcaggaaagatggtattttaattgaatgccggacgtatgacacggtatacggcccgtggagttattttacagcggacgatgggcagatcgatttgaaaacaggcaattatctgattatgggaactctggaatcctacgggaagatgcgtgcttattatggagaggaagcccttgtccctatctatattcatgtagaggatggattgaggctgcgccgggctttggaacgggagcagcagcagaccgtgcctaagtataaggaaatgtgcaggcgttttctggcagatgaggaggatttcagccccagccatctggaacagagcaatataacaaggcagtatgaaaatgtagtgctggaggattgtctcagggaaattgtgcaggagattgggagagtttgccatacgcaatcaaatgcaggacagccggaagttcaggacatctgaagccggatattataaaatacgtgctgtgaaagccaactggattcggctttcgcagcacgttatttttgtatgaaaaattattatataaagaatcagtgcgccacctggcctcagatactgtgcaccggcttctggggtcttccggtctgcggattctccagattatattcattaatcttattaaacagctgtctggcgctgatgcccagcttataggcggtggctgatatgttccaccccatctggttaagtacccactgaaggtactccctctcgctgcggcgcttgaattcgcgccaggggacgattcctgcctgggtaaaggcggtggaaggactgtcgtcatctgttgtcttcagattatagagaatcggtattccttccgtggtgatgacatggttcttggagaggaccaccatccggtccacatggttcctcagctctctgatgttgcccggataatcataattaataagaaaatcccaggccttctcgtcgatgctgtcgattctgatttggtttacccgctgggattcctccaggaagaagtgaatcatgtccaccaggtcctccttcctctccttgagggcggggatgcggatgacaatggtactgatacggtaaaagaaatcttcgcggaacgtactgttgcggaccttggccaccagatcacggttggtggcggttatcagccggaaatccagctgcttgctgttgttgccgccgattcgctcgattctctttgtctcaatggcccgcagaagctttacctgggtggtcaggttgatgtcgcccacttcatctaagaacagggtgctcttatcagccagctcgaattttccggcccttcccttgatggcgcctgtaaacgcgccctgttcatggccgaacagttctgcttccagaagggattccgtataggcattacagttgaccgctatgagcggcatatcggaacggcggctgcaggcatggatatactgtgcagccacatccttgccggaaccggattcaccgataaggaggacgtttacattggaagctgccacacgttcacagtcttccaatgccctccggtaggcaggggattttgtgttgaaaaaaaacttttttttcatatcgttttcgtccataagcgtgtctcctgtacttgatttttaaaaaattattaattatgcataaaattgagaaaaaattaacatgaaaattgtaaaagaagggaaatgtggaagcaaaaaataaaaagaatccctccctaccccctattataactgaaatttatttcactatcaagaaaaatagttcatgaaaaaaaggaaatttaaaaaggccagaagttaaaagaatgacaaaatagacaatatagaaaacctataaaggacggaaacccgatagaaaaaatgtatttccgttggttaaaaggtaaaaaaataaaaaaaatcccgctttagaaaaagttggcacgataattgctctaatattatgtggaatggaatcctatgcctaataaataagaaagatctaaagggtgaaacatcatgtacatcgtagtgacaaacaacgtgaagtgcagggacagatatcaggacaaattaaaagtggacttcctggaaaacggttcctacattgatgtgttaatcaaggtgagaaactatatacataaaggttatcgcctggaaacccatcctatggcagggagcctgaagcctaaccagattccttacaaaacaatcataatttccgactctgaggttgaaaaagaagaattttaccagtttgagatggtgatggagaacagtattcagtcctgtgagaaattcatgaaggacagacggactcctgattggccggaaaatatactggaagacttcagggacgtggatttatccttgattgaaggagctgtaaaaaaaataatatacaaggaggagtgattagatgaaacttgagttggggtgcgttcagattaacgacattcagtttgcatcggaatcaaaagtggaaaacggaactatttatgttaatgcagaagagttgaaggcacttttgttggaagatgaaaacctgaagtccgttgagctggagattgcaaaaccaggagagagtgtccgtatcatgccagtaaaggacgtgatcgagccacgtgtaaaagtcaacggaggtggaaacttattcccaggcgttatttccaaggtggagacagtgggaagcggaaggaccaacgtattaaagggttccgcagttgttaccacaggtaagattgttggcttccaggaaggtatcatcgacatgtgcggcgagggagctaagtacacaccattctcccagttaaacaacctggttgttgtatgcgagccaattgacggacttgcaaagcatgctcatgagaaggctgtcagattcgcaggcctgaaggctgctgattatatcggcaagctggctaaggacgtagagcctgatgaagttaaggtatatgagacctgttccgttaaagaaggaattgaaaagtatcctgagcttccaagagtagcttacgtacttatgcttcagagccagggcctgatgcatgatacatatgtatacggagtagatatgaagcagtccctgccaaccatcttaaacccaaccgaattaatggatggcgctatcttaagcggtaactgcgtatctgcatgcgataagaacacaacctatcatcaccttaacaatcctgttatcgcagacttatttgaacagcacggaaagaccctgaactttgtaggtgtaatcatcaccaacgagaacgtataccttgctgacaagatgcgttcttctgactggacatccaaactttgcgagttcttaggcgttgacggcgctatcgtttcccaggagggcttcggtaacccagatactgaccttatcatgaactgcaagaaaattgaagcaaaaggcgttaagactgttatcatcacagatgagtacgcaggccgcgacggtgcttcccagtccttagcagatgcagatgcaagcgctaatgctgttgttacaggcggaaacgcaaacatggtcatcaacttaccggcaatggataaagtaatcggatatcctgaggttgctgatatcattgcaggcggattcgacggaagcttacagaaagacggttccattgttgctgagcttcaggtaatcacaggagcaacaaatgagatgggcttcaataaattaagtgccagataggaggataagatgtcaaagttaagaattgttcattatattaaccagttcttcgctaacatcggcggcgaggaaaaggctgattaccagccagaattaagagaaggcattgtaggccctggtatggcgttcaaccaggcatttggagaagaagcagaaatcgtagctaccgttatctgcggtgactcctatttcaacgagaacgttgaagctgctaaaaagaccattctggatatgatcagcagccagaagccagacgcagttatctgcggaccggcattcaatgcaggacgttacggcgttgcctgcggtactgttgcgctggcagttaaggaagagttaaaccttccggttctgactggtatgtacaaagagaacccaggcgctgacatgtacaagaccaaagtatatgtggttgagaccaagaacagcgcagccggcatgagaagtgcagttgccaccatggctcctctggcacttaagcttgccaagggtgagaagcttggttcttccaaggaagagggctatatgccaaacggcatccgtgtcaacttctttgaggacaagagaggctctcagagagcagtagagatgctgattaagaagctgtccggcaaggaattcacaaccgagttcccaatgcctgacttcgacagagtagatccgaatccggctgttaaagatatggctcatgcaaaaatcgctctggttacctccggcggtatcgtaccaaagggcaacccggaccacatcgagtcctccagtgcttccaagtacggcaagtatgacatcgacggtgtcatggacctgacagaagctacctatgagactgctcatggcggatatgatccagtatatgcaaacgaagacgcagacagagtccttcctgttgacgttttaagagaatttgaaaaagaaggaaaaatcggcagcctgcacagatatttctataccacagttggaaacggtacatccgtagctaactccaagagattcgctgcagagttcgcacaggagctgaggaatgacggggtagatgcggtcattctgacctctacctgaggtacctgtacacgttgcggtgcaacgatggtaaaagaaattgaaagagcaggaatccctgtagttcatattgcaactgtagttccgatttcactgacagtaggagctaaccgtattgttcctgctatcgctattcctcatcctcttggcaatcctgcattgaccatggaagaagagaaggaaatcaggagacatatactgaccaaggctctgacagcactggagactccggttacagagcagactgtatttgagtaaaccgtaatttagaaatccgtaaaaagaacattgcccggtccttccaatggtgcctaaagttaccatggtatgattcaacaacgttctgaaaatggtgtaattgcacaaaaaagagtttgcaaactgcctgtttagtgataaaatgttatttgaagcggcattttgtgaaccctgaaattcaattgatgtgtaaggagatattctgatggacaagatttatgatgtcatcattctgggtgcaggtcctggcggacttgcagctggaatctatgcaggaagagcgcgtcttgatacgctgctcattgaaaaaggaaaagacggcggccagattgccattacagacgagattgagaattatcccggacagatggtagacggcgagagcggtccttccctgattgaaagaatgaccaagcaggtagagaagtttggagctgagcgtgtcagcgataccattgtcagcgttgatatcgaaggtcctgtaaagacactggttggaagcaacggaacttataaggcacgtaccctgatcattgctaccggcgctttcccaaggccaatcggctgcaagggcgagggcgagttcatgggcaagggtgtttcctactgcgcaacctgcgatgcttccttcttcgaggatctggaagtattcgtagttggcggcggcgactctgctgttgaggaagccatgtacctgacaaagtttgcaagaaaagttactgttatccatcgccgtgatgagctgcgtgcggcaaaatccatccaggagcgcgcgttcaagaatcctaagctgttctttatgtgggatacagttgtggaagagcttcacggagacggcatcctttccggcatgactgttaagaatgttaagacaggcgagcttacaagaattgatgcagacgaagacgacggcctgttcggcgtattcggcttcatcggatacaacccaagaagcgaactgttcgaaggcaagttggagatggaccgcggatacatcaagaccgacgaagacatgcacaccaatgtggaaggcgtgtacgcagttggcgatatccgtgtaaagagcttaagacaggttgttactgctgctgcagacggagcaatcgcttccatgcaggttgagagatggcttgcagagcagaaataagtgattcatagttgagaaagggaggtaataccaatggtagatttaaccaaggacaattttgaagaagaagtattgaaagctgaaggcacagtactggttgacttctacggtgacggatgtgtaccatgccaggctcttatgccacatatccatgctatggagggtgattacggcgataagatcaaattcacctctttaaacaccaccaaggcacgccgtctggcaatcggacagaagattcttggtcttcctgttatcgctatctacaagggcggcgagaaggttgctgagtgcgttaaggacgacgcaactgttgagaacatcaaggctatgattgaggctaacttataatttgtcctcagacaaccgcattattttactagcaaccgtcaatactgacgtttgtctatattatggcgccggggcaatacccggcagccaaatcaaataccaaaaataaaataaggaggaaaacggatatggcaattttgaaagacaaaaaagtcatcatcatcggagaccgtgacggtattccgggaccagccatagaagaatgcgtaaagaccgcaggcgctgaagttgtatattcttcaactgagtgcttcgtctgaacggccgctggtgctatggatctggaaaatcagaagagagttaaagatttcgctgagcagtacggcgctgagaacattgtagttgttcttggagcagcagagggtgaggcagctggtttagctgcagaaaccgttacagcaggcgatcctacttttgcaggtcctctagcaggagtccagttgggactaagtgtattccatgtttgtgagaacgagatcaaagatgaggttgacagcagcgtttatgacgatcagatcagcatgatggagatggttatggacgttgatgacatcgctaaggagatgtcttccatcagagagcagtattgcaaatatttataattaaaatgtaacagtccagaacagttacattagatgtaattccccgggaggctcttcatggggtctccgggggttttgtgcaatcaatgggtttttattgcacaactatgctagtactgcattgcgcaagttccagtatgatacatagctgtaccttgcggcggagcgaaggcggccgcggactgagacttgcgcaacgcagtactagatgtcataaattatggtgaggtgaaggaatgaacggttatgcagttttaaagggtgccagctatacattggcggttacacctgatatggttattcacaatggtacaacacagacaacagagatgattgttaatcctgagtcagaatatttgaaggaacttccaagccatttgagaagttttgaggatgccgttaactatatgccgaaccaggtatatattggcaatgaaaagccacagaaaatggctgaggttggattcccatggtatgataaattaatggatggagccagcaaggacggcaagtacggcgagatcatgccagaggatgagttctacggcctgattcagatctgcgacgtatttgatctggttaaactggaaaagggatttgcagctgacgttaaagctaagctggacgcccatcacatgttcacagacgagcatgtagctattcttgataagaacagcgagacaacacaggaagaaatcgctgctctggtaaatgacgagcatgcagagcctctgtacttcaacaatgtactggttggcgctgttaagagagctcatgacgtggatgtcaacttatccgcacacgttatgttagagaacctggtaacaaaggcttctaacgtattatccttacttaacttagtaaaaaaagcaggagttaatcccgctgacatagattatgttgttgactgctgcgaggaggcctgcggcgatatgaaccagagaggcggcggcaactttgcaaaggcagctgctgaggttgctggatttgtcaacgcaaccggttcagacgtaagaggtttctgtgcaggaccagctcatgcaatgcttcatgcagctgccctggtaaaggcaggaacatttaagaacgttgtggttacagcaggcggctgtaccgctaaattaggtatgaacggcaaggaccatgtaaagaagggacttccgattctggaggacgctatcgcaggattctccgtattagtaagcgctgatgacggcgtaagcccacagatcagaactgatatcgtgggacgccacaccgttggaacaggatccgctcctcagaacgttatctcttccctggtaaccaatcctctggatgaggctggtttaaagattgttgatatcgacaagtactctcctgagatgcagaatccggatatcaccaaacccgcaggcgcaggcgatgttcctgaggctaactacaagatgattgctgctcttggtgttaagaggggcgaattacagcgtaatgagattgcagatttcgttaaggagcatggtatgaccggctgggctccaacccagggacatattccttcaggcgttccttaccttggacttctgagagacgaaatcctggctggcgagacaaagcgcgccatgattatcggtaagggaagcttattccttggaagaatgaccaatctgttcgacggcgtatccttcgtggttcaggccaacgatggttctgcttcagaggagaacggcggcgtagatgagagcaaggtaaaggctatgattggccaggccatgagagcgtttgccgagggtctgatgggcgaagaggaataattttcaccgagagaaaggaaatatgttatgtctgataagaaaataaaagctatgattgctaatacttttcttgaggtggccgatgctcttgaaacaggacaatatggcaaaaagccggttatcggcttcgcctcagaaggcagcgaacatggccaggataatatagaagaagccatgaagattgccgagatgaagggacttaaggctgtcctgatcgagggggaagaccttcataagaagatggaagaaatgctggattccggcgagattgacggcgctgtaaccatgcactatccattccccatcggtgtgtccacagtaggaaaggttgtcaccccaggcaagggaaagcctatgtatattgccaccaccacaggtacgtccgacacagaccgtatcagcggcatggttaagaacgcaatctatggaatcattgcggcaaaggcagacggtgtggagaacccaaccgtaggcattgccaacattgacggtgcacgccagacagagaaggcacttctcaagctggctgagaacggctatgatattaacttcgcagagtccgtaagggctgacggcggtattgtcatgagaggaaatgacctgctgggaggaacacccgacatcatggttatggattccctgacaggcaacctgatgatgaaggtattctcttcctataccacaggcggtaattacgagtccttaggattcggttacggtcccggcgtgggcgagggatatgaccgtcttatcatgattgtgtcacgtgcttccggcgcgcctgtaattgcaggagccatggagtatgccacaaacctgattcgccatgactggaagaagattgctgatgaagaatttgagaaggcaaataaggccggacttaaggatatcatcaacgagttaaagtccgcaggcaagaaggacgcaggcgcagcagccgaggaagtgaagatgcctcctaaggaagtggttacttcacagattccgggtatcgaggtaatggacctggaggacgctgttaaggcgctgtggaaagccggtatctatgctgagagcggcatgggatgcacaggccccatcgtactgatgtctgatgccaacaaggataaggcacacgagattctgaaggcagccggatacgttagctaagataaagccattcattcataagttatacattttccgtgcccgcgaaacatcgctttcgcggggcggaaaatcagaatagatttaagttttcgcgataacttttttgaaagtttcggattgacatacaactgaatacatgatagtatattaaagttaaatgctatccaaaagatatggaggtagataggttgctggtgtgcctcgcggtcttcaaaaccgttgtggggggttaagagccctctgggtgggttcgattcccacctcctccgtttaaaccatatctgtagtggaggtaatatatgatggaagatagaagagagttactccgaaagattccgaaaattgacgaggtgctgcaggatgagcggctctttttttttacggaaagtacgcccagagcagtgattgtggactcggtcagggaagtcattgatgagctgagaaaggacatcctggaaggcaggcggagtcaggtggggaccaaggaaacgctgatgacggaaattgtggcccgcattacaggcaagaagaaaaagagcctgcggcgggttatcaatgcaaccggggtggtgctgcacaccaacctgggaagggcaaatctgtcggacaaggcctgcgagagcatcatggacgtggccagaaattataccaatctggaatacgatgtgaagcgcggatccagagggtcacgccatgaccatgtggaaaaaatcctcaccaagattacgggagcggaagccgccatggtggtcaataacaacgcggcggccaccatgctctgcctctccgccctggcaaaggacaaggaagttattgtctccaggggggagctggtggaaatcggaggttccttccgggtgccggaaatcatggaacagagcggtgccaggctgatggatgtgggaacaacaaacaagacaaagccctcggattatctgaatgcctaccatgaaggtgagaccggcgcactgatgaaggtccataccagcaactacaggatactgggcttcacccaggaggtggaacttcctgagatggtggagctgggtaagaaattaaatcttccggttatctacgatatgggaagcggtctcatggctgacctgacagactgcggggtggacgagcccacggttctggacgccttaaagaccggcatagacgtgattctgttcagcggggacaagctgttaggcgggcctcagggcggtatcatcgcaggaaagaaagagtacattgataaaatgaaggcccatcccctggcaagggcgttccgggtggacaagatgacgctggcggccatggaggccaccttctttgagtattcggatatccgccaggcccgaaagaccataccggtgctgaacatgataaccacaccggccgcagagcttaaggacaaggcggagaggctggccggggagatccgcagaacaacccatcacttcaccgtggaggtggaggcgtgcaaggatcaggtaggcggcggttccgcccccacggtgctgttggacggatatgcggtggccgttcagggcaggacattggcgccggagaagattgagcgccttctccgcaaagaggaaattccaattattataaggattacccacaaccaggtttatctggatgtgaggaccatcagggaagatgagtttgaatatattgtagcagcgtttaccgcaatggacagcagacaggttgaggggtgatgatatgcaaaatgtaatagtgggaacagccggtcatgtggaccacggcaagacatgtctcataaaggctcttacagggacggatacggacaggctgaaggaagagcagaaaaggggaataaccattgagctgggatttgccaacctgcccaatgacgccggaatccatattggaatcatagatgtaccgggccatgagaagtttgtgaagaacatgctggcaggtattggcggcatcgacctggtgcttttggtggttgccctggatgagggcgttatgcctcagacggttgagcattttgagattcttaagatgcttcatatcaagcagggtattgtggtgtttaccaaggccgacctggtggatgaggactgggctgagcttgttaatgatgatgtggacaatctggttaaaggtaccttcatggaaaaggctgaccgcatccaggtatctgcctataccggaaaaaatattgatgtgctgaaacagatgatagtggataaggtaagggcggcaggcgccagacgccaggagaaggagctgttccgtctgcctatagaccgtgtatttacaatggaaggattcggcacggttgtcacaggaacccttttggagggctgctgccaggtaggccaggaggtggagctctatcccactgagaaaaccgtgaaaataagggagatacagacccacggccacaaggtggacatggcctatgccggccagagaacagccctcaacctggttaatatcaagaaggacgagattaacaggggagatgttctggctgcccaggattcccttttgaaaagccagttcatagacgccaaggtgcagttattttcctccacggacagggaactgagaaacggagacagggtccacatcaattatggttcagcccaggccatatgcaaggcagttctccttgataaggatgtgctgtctgccggtgaggaggcttacgtgcagttccggtttgacgagcctgtggctgtgaggaggaatgaccggtttattatccgtttttattctcccaccattacctttggcggaggcatcgtgctggaggctgaggcgttaaagcataagaggaatcatgaggaagtcattgacagccttcatataaaggagctgggcactgatttagaggtcctggagctggagcttaaggaggagagccggtacttcccggttcctaagatactggccgccaagctcaactggaccaatcaggaaacagaggaacagctggaggtcctggtcaaggggaagaaggctgtccgcctcagcgacggaagctttatccacaaggattactggaatgaaatcacgcagtacggcaccgaactcctgaatcagttccacaaggagaatcctatttccgacggcatggagaaggaagaatttaagagccgtatattggataatttcaaaatccgggagtccaagaaagcagatgtcctcctgaatgagatgattaagcgcagcattacggtcaccatggcaagcgccatagcggcagccggatttaatgctgaatattcccatgagcttaaggggatgttaaaagatatagaggacacatatctgaaggcaggatatgagataccggccacggacgatgtgatcggtaagttcaaggacaagaagatggccaaacagattgtaaatgatcttgtgaaaaagggcacattgataaagataaatccaggcgccttgattcacaaggacaactgggacaaggccatgggacttcttaagggatactttgattcccacccgaacatttccctgggagattacagggatctgctgggaacgtccaggaagtatgctgttttattcctggagtactgcgaccagcagaagataacaaagaaacaggacgatgtacgtatccttgtccagaagtcaaggtaggcggctatggaattcagacaattagaagcatttgtaaatgcggtaaagtacaaaagtttttcaaaggcagcagatgccacctttctgacccagcccacaatcagcgcccacatcaataatctggagaatgagatggggacaacccttgtgaaccgcacaggaagggagataaccctgacaaagcagggggagctgttttacccctatgccattgatatgcttcatacccggtcccaggctctggctacggtacaggcccagtgcgaggcgatggacggtgttttggatttatatgcatccagcattccggggcagtactatctgccccggctcataggggagtttcatgccaaatgccccaaaatccgtttttatgtggatcagtcggacagtaagactgtgattgaaaatgtcatgagccagaagggcgagattggactcacaggctataagatgcataacagtctggtgtatgagcctgtgtttatggatgagctggtgctcattgtgcctgatacggagaggtatgcccggtggaagatggggagcacggtgagcttccgtgattttgaacatgagacctttatcctccgggaggaaggctcaggtacaaaacaggagatggaaaaggcggaaatccacggtgtcccagtgtttaaaaatgtggacgtgattgcccgcatgaacagcaccgagaccatcaaacaggctgtggccggaggcctgggaatttccatcctgtccaggatggctgccggggaaaaggaagaaacccaccggataaagtatctgaagatagacggcctggacaagaaacggaccttttacatggtatacagcaagaatatacgcctctccccgatagcggaagccttccgggatcttgtgattgattacagggacagaaactggcagcaggatatcgggcggtttatgtaagggtacatgcaaggttttctgtaaggatttatgcaggcttatcctgcatggaattttgtatagaaaatgtctatagtaaaaaaacatgctatgtttttttgaattggatttgcccctttcactttggtaagatgaaggtagttttaccaaaagaaaaggggatatgattatgaatctgacaagctctaaaaagacgctgctcttatccggagtggcactgggaatactggcatgtattctcgcttactttggcaatccaaagaacatggcaatctgcgtggcctgctttatcagggattccgccggtgccatgaagcttcacaccgcggcggtggtgcagtatttcaggccggaaatcgtgggttttgtctgcggttccttcctgattgccctggctaccagggaataccgttccacggcagggtcgtctcccatgctgcgctttatcctgggtgttatcatgatgattggctccctggcatttctgggatgtccgctgcgcatggtaatccgcatggcagccggtgatttaaatgcatatgtgggatttctcggatttgcagccggtgtatttaccggaactatcgctttaaagcatggattttcactgggacgggctcacgaaaccggaaagataaacggggcagtgcttccggttgtcctggtggtgctgtttgtactgagcctgaccaccacattgtttgcattcagtgaaaagggtccgggcagcatgcatgcccctgcgcttcttgccctggctgtggccctgctgtttggcgccatagcgcagaaatgcaggacctgtttcgcgggcagcatccgtgacgtcattttaatgaggaattttgatttgattactgtgatcggcggactgtttgcagtcatgctggtgtttaatctggctacaggcggattcaagctttcctttgcaggacagccggttgcacattcacaacatatctggaatattctgggactttacgccgttggtttcgcggctgtcctggcaggcggatgcccgcttcgccagctggttttagccggtcagggttcctctgattccgccgtgacattccttggacttttagtgggagctgctttctgccacaacttcgggctggcagcatcggcagcagctgcagctaccgcggatacgcccgcagctccgggcggtctggccatggccggtaaagccgcggtcattggatgtattgttattctgtttattatcggatttatgccaaagcagcaggaagggaaataggaggtaagagatatgtatgaagtagatgcaagaggtttatcctgtcctgagcctgtgatgctgacggcagcagcccttaagaagcacaagggagagccggtgaaggtgctggtcagtgaacctcataccaggatgaatgttgagaaatatgcaaagagccagggtaagacggccacagtaactaaaaaggggtctgaatttgagattgtgattgaataatacagatgtcccggattcacagcgtgtctgaaccagggcttctgaaaccggatgctgcagtggaaggaaatcaggctgtttgaccgcctggtgacagtctgctgcagcatattttagatacgaaaggatttatgggatgagaaaaaaagaaccaaaattaatcattacatttcataccacggcagaagccattgccatggagaagctttgtaaggaaaaccaaaagacaggaaggatgataccggttcccagggaaatatccgcgggctgcggccttgcctggtgctgcgaacctgacatggaacaggagatgtctgagttcatgaaggaaaagggcatggaacatgaagaaatggtccggctcatgtactgatttttaggtgtatgccaacaggtgccctgtcttatgtatgaatgttgggcggacaccggattgtgattgaaatttcccgattgattagatgggaaagggaggcgctattatgatttattttgacaatgcagctactaccatgaggaagccggactgtgtcattgatgcagtgtcggacgccatgaggaatttcggcaattccggcagaggggcccatgaggcttccctggatgcgtccaggatgatttatgaaaccagggagagaatttcggagttgtttaacctgggaaatccgctgcaggttgcatttaccagtaattccactgaaagcctgaacacggccatccagggcctgttttcaaaaggggaccatgtgattaccacggtactggagcacaattccgtgcttcggcctctttatctgatggaaaaccggggcgtcagcctgacgattctgccctgcgatgaaaagggtgttctgtgttatgaccagctggaggaaagcatacggcctgagacaaaggcagttgtgtgtacccatgcctccaacctgaccggcaaccggatggatttggagcgtgttggcgaactctgccacagacacggaatccggctggtggcagacgcctcccagacagcgggagtccttcccattgacatgaagaggatgcatatagacgtgctgtgttttaccggccataaggggcttctgggcccccagggaacaggcggaatctgcgtgggagacggtatacgcataagaccccttaaggcagggggaagcggtgttcatacctatctgaaggaacatcccggggacatgcccacggccctggaggcggggacgctgaacggccatggaatagcaggcctccatgccgcccttggctttataaaggagactggggtggaaaccattcaccgcagagaggcagaactgatgcgccggttttatgacggtgtggtacagataccgggagtccgggtgtacggtgatttcacctctgatgaaagggctgccattgtggccctgaatattggggattacgattcctcagaggtcagcgatgaactggctgtcacctatggaatctccacccgccccggcgcccactgcgcgcctctgatgcatgaatcctttaagaccgtggaacagggcatggtgcggttcagcttttcttactttaacacggaggaagagatcgatgccgggattcaggcagtgagggaattggcggcagaggagtagtccggacatatgatataaaaatggtgcagaatcggtgttataagccagcttaacatctgattctgcaccattttttggatctcggttttggtcctctaaaggccgggcaaactgcggcaattaaaaaatatatttattttccttgacttttaatgatgctgtgactataatgataataagaactattattatttataagaggtatatgatcagcctgattcgatgcagcaatttaccggatgtatccaattaggggagcatagaacgcccctataaacacaaaagagaaggaggttttacatgagaagtatcacaacgttggatttacagtacgcacacaggttttatggttttaaaggtgaagcacagtatctgcacggacacacaggcatattaacattagaggtggaggacacggtgaatgcaggcgtcaatatggtattcccctgcaacgagatccagaaaacagcgtgggaggttttaaagaactttgaccatgccacgattttacgggaggatgatccgctgcttcccgccctccttggggtatatgaagctcagggtatcaaggacggtgctcccaacaatattatgaaaggtcctgctttcaaaacagatcttgcaacagcgtatccggaatgccgtctggttgtaacaaaagaaaccatgacagtggagggcatgattaaaattgtctatgatctgttaaaagacaaattaaacatcgttaaaataaccttcacaagcggtgtaaacgctgcgtctgaggaatttaagccccagaggacaatggagcgctgcccgttatgcggcattgctttagatgaaaatggtgtctgcccgaaatgcggttacaggaaatagaactggtacggaaaacgggaagcaggaatgatttaagctgatagttggaattaagagattgctgcggcaggtatactgccgcggcaattttttatatccgcagaaaatacgtttggttggataatatgcatatataaatattaaaaatagcataaaatatatgcaatagttcagaataacaaaagaaatgtaagaataacaaatggaaaaacgcacagtaaagtcatataatatgactatcggaggtaaaaactcccaatgaatacgtgaactgaaaatatgatataaaaggagaggtgtattatgaagaaacggtttttaacagcttcactggcaacaatgatggttttaagcctggcagcatgcggcggtgggaaggcggccgacacaacaacagcaccggcagcaacagaggcaccggcagataccaaggcggaggacaaagcagaggaaactaaggcagaggagacaaaggcagaagcggaagcagcaggtgagaaggctcctgaggattataagggaaccgtggttgtatattcgccccatgacgcggatcctctgaatgcaggtgttaacctgtttatggagaagtatcctaatgttaaggtagaggtagtggcggcaggtaccggcgagctgtgcaaccgtattgcagctgagacagccaatcccatcgcagatgtactgtggggcggaggcgctgactccctggcagctttcaaggaatattttgagccatatgtatgtgctaacgacgaattcataggcgctgcttacaaggatccggacggactgtggattggcgagagcccgctgccaatggttatcttctataacaaggacctgattgagaaggacggcctgaccattcctgagacatgggaagacctgacaaagcctgagtggaagggaaagattgcgtactgtctgccatccaaatccggttccgcttacacacagctgtgcaccatgattctgggccatggcggcaaggaagacggatgggaattcatcaagaaattatatgacaacctggatggaaagattgttgactcttcaggcaagtgccataagatggtggctgacggtgagttctatgtgggactgaccctggagaaggctgctgtgcagtacaaggatgacccgtcggtaggatttgtatatcctaaggatggaaccagcgctgtgccggatggggtggccctggttaagggatgcccgaatgaggagaacgccaagctgtttattgatttcgttacatccaaagagtgccagaccgagcaaagcggaaactggggacgccgtcctgtaagaagcgacatggaagttggcgaaggcatggctaaactggaagatattccgctggttgattatgactttgactgggcagccaatgagaaggaagccatcattgagcatttcaatgatatcatggtagattaaacctgtgggagtattgcttatagataagcagtagagatatagaatcagagcaacacggtgaaaaggctgtccgggcccggaagggcgggacagtctttcacgtaaaggataggattgaatcaggattggaagatgggccgggagaaggcagcgtcagcatataaggaggaaactggtatgagccatggagttatcataaaggacgccgttaagaggtacggtgattttacagcgttaaagggagtgaatctggagataaaacagggcgaattttttacactgttagggccctccggatgcggcaagaccacgctgcttagaatgatagcgggttttaacagcgtggacggcggagaaatctgctttgacgacaaggttatcaataacctggaggcccacaaaagggatatcggcatggtgttccagaactatgccattttcccccatctgactgtggcagagaatgtggcctatggtttaaaggcaaaaaagtatcccaaggaccagattcccggcaaggtggaggaggctcttgacctggttcagattaagaatctgaaagacagaaagcccaacgagctgtccggcgggcagcagcagagggtggcccttgcaagggcatttgtcatagagccgggcgtgctgttaatggatgaacccctgtccaacctggacgcaaagctcagggtacagatgaggacagtcattaaaaagctgcagcgccgcctgggaattaccaccatctatgtgacccatgaccaggaggaggcactggccatctctgaccgtatcgcggttatcaaagagggcgaggtgatgcaggtgggttccccggagaatatatacaaaaaaccgcagaatacatttgtggcaggattcataggggtttccaatttcgtggaatgtgatgtgaacggcgaaaatccggcagcggcagttcttgatattaagggagagtgcacgattacatgcagtctcaaggcaccttttaagggaaaaggaatcatttctgccaggccggagcagctgttctttgatgaaaaggaaggtttgccgggaaaaattgtcatatccaccttcctgggtgatttcattgaatatgagattgaactggataacggacagaccgtacagcttaacgagtacaccaaggatgtccgcgagctgcgcccggacggacagcgggtcaaggtcaactttgatatcaacgcggtaggcgtttacgacgccggaacccaggaggtgatttcatggtaaagtcgcgcaaaaagctggacttttggttctgggtcaaggtactggtagtggggtttatgctgattttcctgttttatcccttctgtaccctgataacacgaagctttttttcaaaaaatgcggctggttttaccctggagaactatatccggttctttacaaaaaaatactattacaatgccctggggcgaagcctgttcgtatccgtggtcaccacactcacaaccttagtggtgggtgtgcccattgcctatgttatgtccaggtataatgtggtgggaaaaaggtttatccacatttttatcatcatgagcctgatgagcccgccgtttatcggggcttacagctggattaccctgtttggacgttccggttttattaccagcctgtttgccaatatcggtatccatctgcccagtatttacggcaaattgggtattattattgtatttacctttaagctcttcccctatgtgtacctgtacacgtcaggggccatgggaagcattgattccagcctggaggaggctgcggagaatctgggaagcaataagctgcgcaggctgtggaccattaccctgcccgtggtgcttccatccattgcagcaggagccattatggtattcatgaccagcctggctgatttcggaacccccatgcttatcggcgaaggctatatggtgcttccggttctggtatacaatgaatatatgagtgagattggcgggaacgcccatctggccagcgcattgtctgttattatcgtgatctgctccaccacagtgctgctggtgcagaagtattatgtatccagaaagaattacgtcatgacagccatgcgtccccccaaggaagaagtgcttcacggattcaagcgtttcctggccacattccctgtgatgctggtcacctttgtgggaatcctgccgcagattgtggtgcttatcaccagctttatcaaatgtgatttcacgggcttccagaaaggattcagcctgggcagctatatcactatattcaaccgtctgtggaccaacatcaggaatacatttgtattttccacggttgccattgtgttcattatagcgctgggtatgctgatttcctatattgtggtccgccagaagggcgtggccgggcagctgatggatttaattattatgttcccctttgttattccgggagctgttctgggtatcagcttaatcgttgcgtttaataagccaccggtggttcttacaggtacggccctgatcatcattatcgcctttgtggtcagaaaattgccctatacggtgcgatcgggtagcgccttcctgcagcagatggacccaagtgtggaggaggcgtccatcagtctgggtgtgtcacctatgaaaaccttcggcaaggtaacggcaaggctcatggcgcccggtgtgctgtccggagccatcctcagctggattacctgtatcaatgagctgtcatccagcgtcatgctctatgggggcaagacaagtaccatctctgtagcaatttatactgaggtggtccgcaacagctatggtacggcggcagcgctggcctccattctgactgtgagtacggttgtcatgctgctgatattcctgaaggtgagcaaaggaaaggtgtcaatcgtgtagtatgtgcaaaagcctgaagcgttttgtggaaaccttcaggcttttatgaggaaaatgaggagaaaacatatggtaaagttcgggacaggcggctggagagccatcattggggaagaatttataaaggagaacatacaaaagctggcgctggccatatgccttaagatgaaggcagagggcgtggagagccagggcgttgtcatggggtatgacaggcggttcctttcaaaagaggccatcatatggtcctgcgaaatatttggaaaccagggaatcagggtgtggtttgtaaaccgcagctcgcccactcctctggtaatgttctatgtgatgaagcatgagctgagctacggcatgatggtgacagccagccataatccggccatctataacggtatcaaggtgtttacatacgggggcagggacgcggatgagaagcagacagcagagattgagtattacctggaacaggcagaggaactttatcttcccaatgaggaggaaaacggacagatgccgccgccatcctacctggagcttgtaaggaagggcatggtcagggaaatcaatcccatgaatgagtatctggataacatcatatccgtgatcaacatggacgccatcaaagagcgagatttgcgcattgccattgatcccatgtacggtgtgagcctgacggctctgagcaccattctttccattgcaaggtgtaccatagaaaccattaattccaggcacgacaccctgttcggcggaaagatgccggcgcccacagagcggactctgcggaatctccagaattatgtgctggaccggtattgcgatatcggcattgccacggacggagatgcggacagactgggagtcattgatgaccaggggcattatctccacgcaaacaacatactggtcatgctctattactatctgctgagatacaaggggtggcggggacctgctgtgcgcaacctggcaaccacccatgtgctggacaaggtggcggagagctttgggcagaagtgctacgaggtgccggtggggttcaagtatatatccgcgaaaatgcaggaaacggatgccattataggaggcgagtcctcaggcggactgacggtaaagggccatatacacggaaaggacggcatctatgcggcggcccttctggtggagatgatagctgtcagtgggaagaggctgtcggagatagcggcggatatcaggaaggaatatggagccatccatatggcggaacgggattacaggtttacgccagaggaaaaggaacgaatccataacatccttatggaggaacggaaactgccggaaatgccctttgagacagaccatgtttcttatatggacggatgcaaggtatattttaagaacggcggctgggttattgccagattctctggtacggaaccgctgcttcgcatattctgtgagatggaatatgaaccggatacagtcagggtgtgcaatctgtttgaagaatatctgggactgtaggaacaggccggatagacaggagatataaaaatggtaatcaaaccccatcattttatggacattatcaagctgtatggaggcggaatccaggtttttgtaccggatacggattacggccatgatttttaccgggcagcaaatgagattatagggaatcaccggatacagataaaagtcacatccggggctgatgatatatgcgggccatgcaggttcctgggcagtgacaaaacatgtacggattgtatttcacatataaagggaattcgttccaagaacagctacaataagatgctggattgccgcatcatggatattcttggcctgggtgaggacgctgtgtatacagctgaggaattgtgccggataatgggagactgtccggggctggtggcggatgtgtggaaggaggaagccgaagcctgccgggaaacggcaaggaaacggcagcagctgtttgaggcaggggtgagaaaatatttggatcagggtaatgaagttatatgaattgtgatttaagcagtaatgtgtgaggaaggctgcggtttcgttggcatgtgccggtggaattgcagcctttttttgtggataaagatgtaactgttttgtatcggatgtggaaaaagggacgccggcagactgtaagtcagatgcttccataaaaaagagagggaagggggtggaattggcggattatttgcctggtttttgtatcaaagttgtaaaattgtttctggactctaggttcaaatggtataatgagcctaattactttattttacaggtcaatatatacaatcaccggttataagtcttcgggcagaaaaggggctcagactaaagatgaggaggtactggtaatggagaaggtgtcggggcaaaagagaaaaagcagattaagaggctgggtattctggcctccgtttttagtgctgctaatggtattgattttgggatttgtgtcccaggatgcttttttgaaggtggtcaatggggtaaaggattggatttgggggaattttaaatggctgttctcaggttatggactggcagcggtgggggtatgcttctatgcctgcttttctaaatttggaaatacagtgattggcggaaaggatgccaaaccaatactgggcaaattcaactggtttgcaatcagtttgtgtacgaccatagccgccggtcttatgttctgggcagcagcagagccgctgtatcttatgagtgatccatcgccgttttttgatatagagcccaactcacctcaggctgctgtttttgccatggcccagatgtatctgcactggggtattacaccctatgcaatttatgccctggccgcaactgtattcgcgtttacctattacaatatgaagaaaccattttcattgggggcctgcatttcgccgttgctgggggaacgggcaacaaagggaaggctggcagacatcatcgacgccctctgtattttcatactctgcgccggtatgtcgggttccctgtccacaggggcattttctgtggcgggaggcatatccaacataacaggaatacctaccaacggcattatgctgataatcgtcatggcggccattatcctggtatataccatatcggcgtcttcgggcattatgaagggaattaagtggctttccagctttaatgtatatatattttcattcctgattctgttcattttcctgtttggacccacaaaattcatattgaactttggcgttgaatcagtgggagagctgatggattccttctttatgcgcaacctgtttacggattccatgaacctgggcaacagctcctggtccagccttgggaacatgaaggtaggatactgggccagttatctggcctgggctccggttacagccctgtttttaggaaagctggcaaggggatacaaaatcagggactgtattatcataaatctgtttgtgcccactgttttttccatgatttgggtttccatattcggaggtacggctatccacatgcatatgcaggaaagtctgattccgctgctggagacttcaggggcagaatccattgtatataaacttttcgaggtgcttcccctgagacaattgtgtattcccatattcgtgctggcaaccttcatatcttttgttacggcagcggattccaataccaacgcaattgcttctgtgtgcacctcgggaatgtccgaggaggaaatggaggcaccggccggccttaagatactatggggtatgataattggtgtcatggcagctgtcatggctgtttttacaggagtggggggagccaagactcttgccagcataggcggttttccatccatgtttctgcagattgcatcctgcgccgcgttgattaaaattatgcgccatcctgaaaagtatgataaatgccggcaggatacaggaaacggaaaggaagatacaggggaggggaaacatgtacaggatactgattgcggaagataataaggctatttccaatttgattaaaacccatttgtcttttgccggatatgataccagtcaggtttatgacggggaatttgcactggaaattttggaggcggaaccctttgatttgctgattctggacttaatgctgccaaaggtaagcggagtggatattctcgccagggtaaaggattgccagatgcccattatcgtggtgacggccctggacgatttgagcagtaaggtccagtgtcttcaggtgggggcagacgattatattacaaaaccatttgacagcatggaccttttagccagggtgggagcggtactgcgccggtgcaggcgccgccccatgtccctcaatgtcaggaatatcagcgtggacccggaccagcaccgtgtgcttaaggacggaaaggagatagagctgacacccaaggaatttgacctgctgtactacttgtgttccaactgcgataaggtactgaccagaaaggaaatcctctccgatgtatggggatataattatgtgggggagaccaggactgtggatatccatatccagaggctgagaaaaaagctggattgggagggcgccatacagaccataaccaaggtggggtatctgcttaaagggagtgatgacagatgaagctttggcagaaaatatttctgggcgcatttatagccagcgtggccatattctttttctgcggattctatattgtggtgaccgggctgcattttacgctggaaggtgagatgaaaaggacggaatattaccagtctgtctacgcccggaaaataaaatcttttttccgggaaccagatgtgcagagcgggctgtcagggttcatggatggtttcagggaagaactggcgggtgagggaaggtatcttcaggtctgggagggggaggagcttcgatatgacagttttgagaagtttcctccggcaccgcgctatactttcgtggagggacaggcagcatatacgcctacgtatatgaaggatataggggattccaggtatctgtacgtggagtccgaatttccctgtgacaatgccatgtataaggttgtgatgattaaggatttatctgatatatataaatcctgcgacatgcagctgaatattttctttgctctgtgcctgatacaggcttttatcacagccatgattatgtttctgattaccaagagaattacctcgcccattgaacggctgaatgaagcggcaaagcttatggctcaggaatccattccccttaagctggccgttgagggggaggatgaaatcagtgagctgtcccataactttaatctgatgtctgaggccatcaacaggaacattgatgattacaaacagattgtaggcaatctgacccacgaaataaaaacccctctcacatccatcattggttacgctgagctgcttaagaatcatgagtgtgacagggagcttcaggaacaggcattggattatatcctggaagagggaaaacggctgaattccattacccggaaaatgattaagctgtcgcgtatacagccggggctgctgaacatagagcggcaggacgtaaaaaagatgctggagacatcgctgatggctgtgaggatgaaggccgggcagaaacagattcattttacttcggatattccggagggtatattctgctatggtgacagagagtttctcattaccatgatggaaaatgtcctggacaatgcaatcaaggcttcccatgaaggcggagtcattgaagtcagggcagccggcgaagggggggcactggcttacatccaggtaacagatcatggaatcggaatcccggctgatattctggataagatagaccagccgttttttaagggggataaggcccacagccagggaggagacggttttggcatgggactggccatttgcaagtcggtgatgctgcaccatcacggctcgctgaaatatgagagtgtagtgggagcgtataccacggtcacgatgaggtttcccgctgctgattacctgcgactggaatcgccggaacagacagaccaggtgaaaaaggattctttgtgggtgtatgaggcgtccaacatcatacgctgacaggaaattgggacggattgtatcaaagctgtaaccaaactgttgtcttttgaacaagaagacggcagtttgatttttatacggtataatgagagacaagttgagacgcgtatcaacaaaaaccaagagaagacggtacaaaagggggttttatagtgaacagtaataaaaaatttgatatgaaaaagtggacatccctgttggtgctctgctgcggtacaggtgttattttccagcttccctatatccggaatacattttatattcctctggtggaggcccttaatctaagcaatgaggaatttggagcactgtccacgtcctatgcaaccatttccatgatatgttatttcttcggcgggtggattgcggatcgcgtatccccaaggaagctgctgactatttccttcatatccacgggcctggtgggacttctattctccaccttccccagctatggcaccatgaggctgatatttgcggccttcggtgtgaccaccgtacttacatactggtcagcgcttatcaaggcagtgcggtgtctgggggacagcaatgaacagggccgcctgttcggtatactggagggcggaagaggagttgtgtcggcaacggccgtgtttgtgcttctggggctttttaacagcctgggaggcggaaagttcggattgagctgggtgattcgctcctatgccctgctggccatcatagtcggcattgccctttggttcctgattaaggataagaaagaggatgtggtaagcggtacaagcctggtgcagcagattaagagcgtgctcctgatgcccaagatgtggatgatatgtctcattattttcacagcctattccatctatgcaatcctcagcttcctgccgccttatatggtatctgtatatggcatgtccaagaatttcagtgtccagattggaggcatccgttacatcatacagtttgcagggggaatcacaggcggtttcctggctgacaagattggttccaggataaagacagttctgttggggtatacggccattattgcatttctgattgtgttcctgcttacaccgcagcagccttcactggccatgctctgtgtctttgatttcatcctgttaaatgtaaccgtgtacgcggtgagaggcatatactttgcagtcattgacgaggcgcagattgaccgttctgtcacaggcgcggtttccggtatggcatcctgtatcggttatctccctgacgtatttctgtataccatgattggacgctggattgaccagggcgtacagggttaccgctccatgttcctgtatggcatcggaacctgtattgtgggcgcggcagtggcggtcatcctgattaagagtatcaggaaaatccctgcaaagggttaagtgaatgaagagggacagcattaaattggcaatggaaatgaataaaaaattatatatatgtatggaggtattttatgaaaatcacaggtattgaaatcaaacagtatgcaaagccattggacccgccattcctggcatcatgggatcccaacccacgggtaaaattcgcgtctaccattgtttatgtatacacagatgagggaattacaggaatcggatccggcgatctgatgacaggctttgcgggccatgagaaattctttatcggcaaggatccgtttgagatggaaaaccataacaagattattgataacattgatttccattatggaaggtgctggcctttagacattgctctatgggatatcattggaaagaaatgcggacagcccatatataaacttctgggcgggaaacaggataagataaaggcatactgctcctgcggggccaggattccggcagaggaaagagctgagaaggccagggaatatgtggagatgggatttaaggcaatgaaaatccgtttccaccatgaggatgtgagagaggatatcaaggtggtagaggctgtccgtggggccattggcgataagatggaaattatggtggacggcaaccaggcatggaaaatgccatgggatgtggagcgtatctgggatttgaagaaggcagtgaaggtggccagggaattggagaagctgggagtatactggctggaggagccgcttcaccatgcggattacgacaatctggcccgcttaagggagatgacggatatccggattgcaggcggtgagatgaaccgcagatggcatgatttcagggatttggcagataagggaagctatgacgtgtaccagccggatacggtgctgtgcggcggctttacccgcaccaagaagattgccgactatgtgcagtccaagggagctgttttctgtccccacacatggtccaatggcgtgggccttctggctaaccttcatatggcctgtgctgtcagcgacgcggaatacctggaatacccatttgatccgcctgtatggacggttgaccgcagggattacatccttaaggaggaggatagagtcctggttgacaaggacggttacatgcatgttccccagaaaccaggacttggatttgagccggatgaggaagcgctgagggaatatgagattaaggattactatgtaggtgaataagtatagaaaccataagggcgctccctgttcaggcagggggcgccctcaggcatgtatggggctcaggttggaaaagggttaaaacaccgcaaacctcacataggtccggtcatcaaaactctggtttccttttacaagcccctttgttcctctgttttcccggaggcactgagggtctttctgcaacaactcatccagggacttctcgctttcagccagggtgtcttttaatacggggtaaccgtcgctggccagtacgacctgggtttggggcgggaccggatagacggacacatggtgagagtgaatggcaaaaccgtcaagtacatcatagccatagggccggtcctggttggccagaaggaattggcggcgcagcagaggaaggatgcaggcccggcccgggtcatgccgggcaaaatcatcttcggatccgcctaaaatcagttcagcctggttatagagacagcggatttctgccatgaggccgtcgatttccttgccgtgggagtgaagggtatccccgataaggcactgacagtccccaaaggcccacacttcccttttctgacagctatacaggatgaccactgcctgaagccgctcctccgggtggtccctcaggaattcacgccgtccgcttccggcttttgctaaggcctggtttaaatattccatcgcagaagcagcgtctatgccgggctccatggttttaagagcctgggccagtatctccctggcatagcgcccgctggtcatgggagaaagaaaaacggatccgccttctgacccatccggccaagtaagctctcccttgctggtgacaccgtctatgacagcgataaagtcattgctgataaaaagaccgtcctcgcatttcttctggtccgggtatttggaacagataaattgttcaatgatttggacacccatattgtttgcctccgtttaacggtaatttccgcgttctgtcttaagggtaacacggggcaggaatgatttcaatggcttcgtcaatggaaaaatgggtttttctttggtataatgtagcaaatgggactgattgacattggggcgccaatgccgggaaggaaacaagcgtatgaaaaagactgtcatgggtatgaaggcagctgtgaagggtaaaagagggagtgtgaaggggataaataggactgcctggggaaaacgggatatagcgttctgtgccctatgctttttgtgtacggcagctctttcctcatgccagtcaggtccgcagacagctcccatgcccgctgtgccggacctggttctctatacggcccaggaggaagagatatatgagcctatcatcaaggagtttgaggagcgcaccaacctgatggtgaaggtggaacgggggtcctccgaggaaatgacaggcagactggagaatgaggaggaaaaaccggattgggatgtggtgtttggagtggggatagagaccctggaacagaccaaggaacattggcaggaatataaaagcccggaggcagcatttataacagatagcttccaatgtgaggataaccggtggaccagcttctccgccctgcctctggtcatcatgtacaatacaaatgtggtgacctaccgcgaactgccggtggggtggaacagccttctggagcccaggtggaagggaaggattgcatttgtggacccgcgccggtctgatgtgtattcggctgcccttgtgacggctgtccatacatgggagaaaaagggggattatctggaacggtttatggaaaatctggaatatggcaccctggacagtatgcaggaggtgaatgccggtatcctggatggaaggtattcccttggggtcaccatggaggagtccgcccaggccctgctgtcagagggagctgacgtggattatatttatccccaggagggaaccacggcccttccggacggcacagccattgtaaagggatgcgcgaatcctgacgctgccaggcagttcctggattttacggtgagcagggatacccagaggattctggtgtcggatttaaaccgccgctccgtgagaggagatgtgccgccgctgccgggattgtcgcccattggcaggctgccgctgattgagatggacctggaggagctttccagggaaaagaaggatgtactggccaggtggaacagcattctgtcccggcaaaatgcggggggggggggcatgaaatgatatggtaccggagactctcttttaaaaccagggtatttctgggctgccttctggtggctttggtgccccttacattttcaagtgttgtgatgatgcgtctgtttactgcctcaatcaaccgccagataaccgtggacggaaaccagcagctggaagaagtcagggaacggtttacccagctgttggaaaattgccagaaagcttgtgaaacgctgacagaggacggttctgcggcatgggtcatgattgacaataagaccatagagttccagaaggatttgtatttgtccatgtaccaggcggttcaggagatatacagccatgcgcagttcagtatctatgatgtgggcgggaaactgcgttttaccacggatacggcgcccaagagcagccgtctgcctgtgaactggggactgctcaacaaggcgtcgggggagcagggaatcacctattacaggacagatccttacctgccgtcctccggcagcgacgtgctgatgcagggtgcattttcactggagagcacccacggggccaggaccgggtatgtggtgctggactttaccagggaaaattttgacaacctgctgaacggtttttattcgtccggtgatacactgctggtactggattcccaccagaagccactctactgttccaggccggaatatggggaacgtgaaatcagtgatataatcgggcataccatatcgggccagggcgggacggaaaaagagggggtatataccagatatctgtggaccagggaaccttcccagggcttttacatcctgctgcgctgctccgctcccatcagcgccccggccgtgcgcaccatgggtacggtgagccttgcgctgtccggcctgggactggtgctctgccttttcatatcaggcgcgttgtcccggagcatcggccagccggtgagcttgttggataaggccatggcaaaggtgaaaaaaggggatttgtccatccgcatccgcaccaaccggcaggatgaactgggcaggctgacagagagctttaaccagatgaccggggacctgcagaagtacctggatgatacggtgcagaagcagaaggatttaaataagaccacgcttaagctgtaccagacccagctgaaccctcattttctctataataccctggattccatcaagtggaacgccagaatcaaccaggttccggagattgcagtgctggcggaaaacctggctgtcattctgagaaaaagcatatccagccggccctttatcacactcagagaggagcttgagaccatcgagagctatgtggagatacagaaaatacgttttacagggcggttcctgtatgagacagagataccggaccagctggaggactgcatggtgcccaagatgatcctgcagcccctggttgaaaacgccatcatccatggactggacggctgcggacacggctacatctgtatttacgcgttccagaaagaggggatacttaacatatcggtgacagacaacggatgcggcatgagccgggagatggaggactggattaacagcgaagctccggcaaagagggacggccatctgggattgtacaatgttatcaacatattgaaaatatattacggacaggagtacggtgtgaaggcggctgtcacggaggatgggaccaccatcaccctcaggctgccggttcagaaggaggtaccggatgtataaagtcattgtggtggaagacgagacaatggtcaggcgcgggattatcctgaccattgactgggcggcactggactgtgtgattgcaggggaggctgccaacggggaggagggggcagagctggcggtccgcctgtccccggatataattgtgacggatgtgaagatgcccagaatggacggcgtggagatgataacaaaactgcgggaacagggctgccgggccaaattcattattttgacggcctacagcgattttaaatacgcccagagcgctctcaggctgggagtcagcgactatctgttaaagcctttgagggacggcgatttggaacaggcggtgaggcacatcagagagcagatggaagaacgtccggcaaaggaggaggagacagacgcggctccggtcctgcgctttcattccgataaaaaatccaagaataagtatgtggaggcagccacccggtatatcagggagcattaccgggaggatatcaccatcagcaccgtggcctcttttctggaaatcagcgaaggctacctgagccgggtctttaagaaggaaaccgactacacctttaccaactatctggcctattaccggatgcagatggccatgaacctgttaaaggactgccgggtaaaggtatacgaggtggcggaccaggtgggctattcagacacagcgtatttcagcgcgcagtttaagaagatactgggggtgtcgccgtccgagtatcaggacaggtgcagatagcggcgggggttcacagaggttataaataggaaaaacagggaaaaatgtagtactatacattgaaaaattcttatgctatacttattgaggatgtctgtccctgccgggatggaggtccggatataccggtttagggcatttccggggttttggaaaccaggccggcagcgcaagggggaaccaatcactatgttgggatttaacgatatattaggacatgaacagataaaggaacatttccgcaacgcagtgcagacagggaaggtttcccatgcgtatatactgagcggcgaggctggaatgggaaggaaatccctggccaatgcatttgccctcagcctgctttgcgaaaaggggatggaggagccctgtatgcagtgccatgcctgcaaacaggtactttccggaaatcacccggatcttatttacgtgacacatgaaaagcccgccagcatcggcgtggacgatataagggagcagattaacgataccatccaggtacgtccctacagcagttattataagatatatataatggatgaggcggagaagatgaccgtacaggcccagaacgcccttcttaagaccattgaagagccccctgcctatgcggttatcctgcttttgaccacgaatcaggacgcgtttctgcccaccatcctgtcaaggtgtgtacagcttaagctgaagcctttaaaggacagcgtggtaaaggaatatctgattcagtctctgggagaaaatgagagcgaggctgatatatacgcggcttttgccagaggcaatctgggcaaggccatccacctggcccagtcggaggagtttggggtgatgtaccgggagatgcttcatctgctgaagcacatcaaggatacggatatatccgagcttttagactacatccgcaaggttaaggaggagaacctggatatcagggaatgcctggactttatgcagatgtggtacagggatatcctgatgtataaaaccacaaaggatattaacctgctgatatttagggatgaattctccgctgttaagagtgtcagcaccacaagcggctatgacggtctggagaaaattctggaagccattgacaaggccagaatcaggctggacgccaacgtgaacaccgaactggtcatggagctgatgcttcttaccatgaaggagaattaggacgtgtcagggctgcaagagaaggagaacacagaatgattacagtaatcggggtgcgcttccgcaccgcaggaaagatatattatttcgaccccgcaggccgccagattaagacaggcgaccatgttatcgtggagacggccagggggattgagtacgggtatgtggttctgggcaaccgggaagtggatgaatccaaggtggttccgcccttaaaatcagtgatccgtatggccacggatgaggatgagacggcagaggccaggaacaagcagaaggagagggatgcctttaaaatctgccaggaaaaaatcaaaaagcatcatctggatatgaagctcattgacgccgaatacacatttgataataataaggtcctgttttactttaccgccgacggcagaattgatttcagggagctggtgaaggatctggccagcgtgtttaagaccaggattgagctgcgccaggtaggcgtcagggacgagactaaaattatgggaggcatcggcatctgcggaagggcgctgtgctgccattcctatctgtctgaattcattcctgtttccatcaagatggcaaaggaacagaacctgtccttaaatcccaccaagatatcaggcgtgtgcggacgccttatgtgctgccttaagaatgaagaggagacatatgaggtattaaacagcaagctgcccaatcccggagactatgtaaccacaagcgacgggttaaagggcgaggtgcacagcgtcaacgtgctgcgccagcaggttaaggtcatagtgaccgtggagcgggacgaaaaagaaatcagggaatacaaggtggaccagcttaagttcaagcccaggaaaaagaagggcaagggcggcggagaaaagcatggaggcgacacgccggacgcagagcttaagcagctggaagcccttgaaaagaaggaaggaaagtcgaagctggatgacaactgatacagttacggtgaaacacacttggcgtcaggaaggaaccattatgttgcgggacgacgagcggatcgatgatttgcagcgcaaccattatggaatcatccagaggaagggcgcattctgcttcggcatggatgccgtccttctgtccggctttgccgttgtgaaaaagggggaaaaggtgctggacctgggaacaggcacaggcatcattcctattcttcttaccgccaagacagagggaagccactttaccggcctggagatacaggaagagtccgcggacatggccagacggagcgtggcatataatcatctggaaggcaaggtggacattgtcaccggcgatatagtggaggccagcaggttgtttgcactggcttcttttgatgtggtaaccacgaatcccccctatatgaatgaatcccatgggcttaagaatccgggggatgccaaagccattgcacgccatgaggttaaatgcacgctggaggatgtggtgagggagggaacccgggtcctgaagccgggaggccgttttttcatggtccacaggcccagacggctgattgaaattatcactgtcatgaagcgccatggcctggagcccaagcgcatgaagatggtccatccttatgcggaccgggaggccaatatggtgctcatagaggctgtgaggggaggcggtcctctccttaagatggaagctccggtcattgtctttgaccagaatggggagtattccccggagatacggaccacctacggatattgacggatgatggcagcgtccaaagaacagacgcttaaatgttccgggaacagacgcttaagcatccaaagaacagaagggagagggccatggcaggaacactatatctctgcgcaacgccaatcggcaatctggaggatattaccttcagggtactcaggacattaaaggaagtggatttgattgcggcagaggatacgcgccacagcatcaagcttctgaatcattttgatataaagactcccatgaccagctaccatgagtataacaaggtggacaaggccagatacctggtgggccagctggaagaaggggtggacatagccctgattacggacgcgggcacccccggtatatcggatccgggagaagaactggtaaggcagtgctatgaggcgggaatccaggtcacctctcttcctggtccggcagcatgtatcacggcccttaccatgtcagggctatccaccaggagattctgctttgaggcgtttctgccctctgagaagggggataagaaggagcgggccagaatcctggaggagctgaggcaggagaccaggaccattatcgtatatgaggcgccccaccatctggtgagaacacttgaagatttatataaggtccttggggacaggaacataaccatatgcagggagcttacgaaaaaatatgagacagcctacaggaccacgttccgggatgccctggaacactaccatgaggaggagcctaaaggagagtgtgtcatagtaatagaaggaaagcctctggaggagctgcggaaggagcagataagccgctgggaagagatggaaattcaggaacatctggccttctatacggaccagggcatggataggaaggaagccatgaaggcagtggccagggaccggggaatcacaaagcgggatgtgtaccagcagcttctgtgatgggaacgcagacaatatgggatgagaatgatttggaacgatacgcaaagagatagagagaacctgcggcgtatatgccttctgatgttgagaaggagccgcaggttctctctatgtacgtgctttgattactcggtgacattaaggccggctaatttagccagtgcgacaacggactgacgcgatacttttttgccttcatattccagcaaatcgtcagtgcttccggtgaagatgtcagcacattctgccttcttcaggatgatacagtcatcctgaaccgtgatttcaagaccatctttcacatccaaatcaaggcttcttcttaattcgatgggaagggtgattctgccgagttcatccaatttacggataacacctgtagttttcatggttaatacccccttgtgaaatgtattcgccccatttgtacaagtttaacttaccaaattcagggagcaaagtcaatatatgtaaatgtcagaattggtaagaaatgtaagagaacagtaaagttaacaaaaagcgacaaaaaatatttcttgacaaatacttacgtttcctgtagtattactttgatgttcaaagtatttcctctgagcaagcaaaagaaggaaggcatgagtccgctgattgctgatggattcgggatgggtaagaagaatgacaacaagaatcgtaggaaccggttcatatgtaccggagcagattgtgaccaatgacgaccttgcaaagattgtggagaccaacgacgagtggatccgcagccggacggggataggggcgagaaggattgccaccagcgaaagcacctcctatatggcggctgaagcctcaatcaaagcgctggagaatgcaggcgtaaagcctgaggaaatagaccttatactgctggccacctcatcgccggattactgttttcccaatggcgcatgcgaggtacagggccgcataggcgcggtaaacgcagcctgttttgacctgagcgtggcctgcaccggttttgtctatgcgttgaatacagcccatgcatttataagcagcggcatctataagacagctcttgtgattggcgcagacgtgctcagcaagctgattgactggacggacaggggaacctgtgtgttatttggagacggcgcaggcgcagtggtggtaaaagccgatgaaaccggtattctgggaatgaacatgcactcagacggtacaaaaggcggagtgctgacctgcggttccaggaccaatggaaatttcctcatgggcaagaagccggagctgggatatatgaccatggacggccaggaagtatttaaatttgcagtaaaaaaagtaccgcagtgcataatggaagtactggacgatacaggcgtaaaggcagaggatgtcaggtatttcgcaatccatcaggccaattaccggatcattgaatccatagcaaaacgcctgaaggtaaatgtggaccgtttcccggtgaatatggaacactacggcaatacatcaggggcatcagttccccttcttttagatgagatgaaccgtaagggaatgctgtcagcaggagacaaagtggtgctgtccggattcggcgcaggccttacctggggtgcggccctgttagagtggtaaaaataaaattataatataaatcaagaaaatgtaaaaggagaacaacaaccatgttagagaagatgaaagaaattattgcagagcagttaagcgtagaggcagataccgttacagaggcttcctccttcaaggaagatttaggcgctgactccttagacctgtttgagctggttatggctctggaggatgagtattctgtagagattcctgctgaggatttagagcagttaaccacggtcggagaggttatgaactacttaaaagccaaaggcgtagaggcataaatagcagatagggtttgacaacggcgtgtggatgaattgaagcacgctgttactttaataggggaaagcccaggaaatgtagaactggaggtagaacaatgaaaacaagaattacagaaatgttaggaattgaatatcctattattcagggcggcatggcctgggtagcagaacacaacctggcagcagccgtatccgaagcaggcggtttcggactgattggcggtgccaatgcaccgggggaagtggtgcgcgacgagatccgcaaggccagagagctgacagataagccttttggcgtcaatgtcatgctgctgagcccccatgcggaggatgtggcaaaggtggttgtggaggaaggcatcaaggtggttaccaccggtgccggaaaccccgaaaaatatatggaaatgtggaaggcagcaggcattaaggtgattcctgtggtagcaagcgtggccctggcccgccgtatggagaagtacggggcggacgcagtggtggctgagggcatggagtccggcggccatataggagagcagaccaccatgacgctggttccccaggtagcggacgctgtttccattcctgttatcgcggcaggcggtatcggagacggaagaggaatagccgcggcctttatgctgggtgctgaggcagtccagatgggaaccaggttcgtggttgccaaagaatccattgtacatgagaattataagcagcgcattatcaaggccaaggatattgattccacggtcacaggacgcagccacggccatcctgtaagaggtctcaggaaccagatgaccagggaatacatcaaactggagcaggagggcaagtcctttgaggagctggagtacctgactttgggaaccctgcgcaaagcggttatggaaggtgatgtaaacggcggaaccgttatggccggacagattgcaggcatgatatccaaggagcagacctgtaaggagatgattgaggaaatcatggcacaggcaggtaagctgatgggctggaactaataccgcacggcgtattttgccggcaggaaccagttgattgggacaggatttaggataaggagataacaggtatgagcaagattgcatttattttccctggacagggagcccaggcctgcggaatgggccaagatttctatgagcagactgagaccggaaaaagaatctttgacaaggcaacagagttaatgggattttccatgccccagctgtgctttgaggaaaatgacaggctggatatcacggaatacacccaggcagccatggtaaccgccagtatcgccatgatgcgtgttctggaagaaaatggaattaagccggatgtggccgcgggactcagccttggagagtactgcgccctggcagctgccggagtcatgagtgatgaggatgccatccgtaccgtccgccagaggggaatacttatgcaggaggctgtacctgtaggcgagggcgccatggcagccatcctggccctggacgcttctgccattgaagaagtgacaggagccatggaaggcgtgtggattgccaattataactgtccgggacagattgtaatttccggtgagaaggctgctgtggaagacgcctgtgagaagttaaaggcagccggagcaaagagggcagtgatgttaaatgtcagcggacccttccattccggtatgctggcagatgcaggcgagaagctgggagaggtcctttcccaggtggagcttcatgagccgcagattccttatgtggccaatgtgacggcacagtatgttaagagcgctgcagaggtaaaggagctgctcacaaggcaggtttcatcctcggtcagatggcagcagagcgtggaagccatgattgcggacggcgtggacaccttcatcgagattggaccaggtaagaccctggccggcttcatgaggaaaataagcagggacgtgaaaaccctcaatgtggaaaaattagaagatatcagtaaagtagcggaagcacttaagtcataagcaggaggagagaccatatgctggaaggaaagattgcactggtaacaggcgcaagccgcggaatcggccgtcagattgcccttacactgggccgggaaggcgcatccgtaatcgtgaattataatggctctgcggcaaaggcagaggaagtagtgaaggaaatcgaagcagcaggaggcaaggcagaggcagttcagtgcaatgtttccgattttgagagctgtggcaggatgatggcggacgtggtttccaggtatggccgtctggatatcctggtgaacaatgcgggaatcaccagggacaacctgcttatgaagatgtcagaagaagattttgacgctgtcataagcacgaacctgaagggcgtatttaactgcatcaagcatatttcccgccagatgttaaagcagaaggcaggaagaatcatcaacatctcctccgtatcaggggttctgggcaatgcaggccaggccaattactgcgcggccaaggccggcgtcatcggcatcaccaaatcagctgccagggagctggccagcaggggaatcacggtaaatgcagtggctccgggtttcattgcaacggagatgaccgatgttctcagcgacagcgtaaaggcagctgccacggagcagattccaatgaaacatttcggaagtacccaggacattgcagagacagttgctttcctggcttctgataaggcaggatatatcacaggccaggtcttaagcgtagacggcggaatggccatgtaggatgacctggaatattttccgggctgaaaagaacaggagtgagatagtatgaaaacaagagtagtagtaaccggtatgggtgccattactcccattggaaatgatgtggagagcttctggcagggacttaaggataagacagttggaatcggccccattacttattttgatacaaccgattataagtgcaagctggccgcagaggtaaagggatttgatccaaaacagtacatggatgccaaggcagcccgccgtatggaggcattttctcagtttgcggtggctgcatccaaggaagccctggagcagtccggcattgatatggagaaggaggatccctaccgagtaggcgtgtgcgtgggatccggcatcggctctctccaggccatggaaaaggatgtaaagaagcttaacgagaagggacccagccgtgtgaacccccttctggtgccactcatgataagcaacatggccgcaggcaatgttgccatccagttcgggcttaagggaaaatgcttcaacgtggtaactgcatgcgcaaccggaacccattccattggtgaggcattccgttccattcagtacggcgaggcagacgtgatggtggccggcggagcagaggccagcattacccctatcggcattgcgggatttacctcccttacagccctgaacaccacagaggacgcttccagggcatccatcccctttgacgaggacagaaatggttttgttatgggcgagggagccggcgtggtagtgctggagtccctggaacatgcaaaggccagaggagccaatatcctggcagaggtagttggatacggcgccacctgtgacgccttccacatcacttcccctgcagaggacggaagcggcgcagcccgtgccatggagaatgccatgaaggatgcaggcatggctgcggaggatattgactatgtcaatgcccacggcaccagcacccatcacaatgatttgtttgagacaaaggccatcagactggctttgggagaccatgcggaaaaagtgaagattaactccaccaaatccatgattggccatcttctgggagcagcaggcggcgtggagtttatcacctgtgtgaagtccatccaggatggatttgtccatgccacagtaggacttgagaagccgggagagggctgcgatctggattacaccatgggcgacggcgtttccatgaacgtggatgtggccatcagcaattcccttggatttggcggacataatgccagcctgattgtgaaaaagttcagcgaataataggaggccatgagctatgaacgtagatgaaatcataaaattaatgcaggcagtttcagacaacgggctgaccagcctggagttaaaggaaggagagcttaagctttcactgaagcgcgaaaaagagatgcctcagattgtaacggtaagcgcgccgtccccagacgcgccgtccatgcagatggcagctatgcagaacggcctggcagctccatccatgatgtccccggccatgatgcctcagggtgtgatgatgcctcaggcagcccaggacacggctggccgcgctgatattggttcagacaaggtagttacttcccccttggtgggaaccttctacaatgcttcttcaccggacgctgctccttttgtacaggcaggagataccgtgaaaaagggccaggtactgggaattatcgaggccatgaagctgatgaatgagattgagagtgaatacgacggtatcgtggaagctgtccttgtgaacaacgaggaagtggtggaatacggccagccattgttccgcatcaaataataccaaaagacggagggatttaaggatatgttgatgggagttaaagaaatccaggagatcataccgcacaggcatcctttcctgctggtggattgtattgaggagctggaaccaggcgtgcgcgccgtgggatataaatgcgtgacctatgatgagtcattttttaagggacactttccgcaggagccggttatgccgggcgtgctgctgattgaggccctggcccagacaggggcagtggctattctgtcccaggaagggttcaagggaaaggtggcttactttggaggcatcgaaaaggctaagttcaaacgcaaggtagtgccgggcgacagagtaaagctggagtgcgaaatcatcaagcagaagggaccggttggcgtgggaaaggccactgcgacggttgacggaaagctggcggtgagcgcagagctaacattcatggtaggttagggaatcgagggagaatgccgatgtttaacaagattttgattgccaatagaggtgagattgcggtccgcgttatccgggcctgccgtgagatgggaattcagaccgtggccgtatattccgaggctgacagggactgtcttcacaccatgctggccgacgaggctatctgtatcgggcccgcagcctccacggacagttatctgaatattgagaggattctggcagccacagtggccatgaaggcggacgccatccatccgggattcggcttcctgtctgagaatgccaggtttgccaagctgtgcgccgagtgcaatattgcgtttatcgggcccagcgcggaaattatcaataagatgggcaataaatccgaagcccgaaaaaccatgatggaagcaggggtgcctgtggtgcctggcagcaaggaaccggtccacgcggctgaggacggtctggccatggcaaaagaaatcggcttcccggtgatgattaaggcgtcatccggcggcggcggcaagggcatgaggatttccagaagcccggaggactttaccgagctctttaacgcggcccagatggagtcggtgaagggattttccgacgacaccatgtatattgagaaatacattgaaaagccaaggcatgtggagttccaaatcatggccgacaagcacggcaatgtggtccatctgggagagcgtgactgctccatccagagacgccaccagaaggtgctggaggaagctccctgtgatgtgatttcacccggcctgcgaaaagccatgggcgataccgccgtaaaggcagccaaggcagtgggatatgagaatgcgggaaccattgaattccttctggataaggataagaacttttacttcatggagatgaataccaggattcaggtggagcatcctgttactgagatggttacgggaatggacctgattaaggagcaaatccgggtggctgcaggggaaaccttaagcgtcagccaggaggatgtgaggattgaaggccatgccattgagtgccgtatcaatgccgagaatccctctaagaacttcatgccatgtccgggacgcatcaccaatgttcacattcccggaggcaacggagtccgcgtggacacccatatttacaatgattataaggtgcctgcaaactatgactccatgctgatgaagctgatagtatatgacaaggaccgggaggcggccatatccaagatgcgcagcgccctgggcgaggtaatcatagagggaatagagacaaatatcaacttccagtatgaaatcctggaaaatgacgcattccagcagggagatacagacaccagctttattgagaagcatttcccggactatgtgcggtgattttgtgccgctgacgggaaggaaacatcgaccatactaaattgttaaagaccccgctaagtatggcgaagtgctttcgcacattagcgcctggaggacaggagctggcgtgcgcagtgcaaatgcgcggtacaagtgcgcgatgcagaaaggaaattgctatgttgcggaacatgttcaaaaaaacgtatacgaaaatagatacgaaatataagccccaggccggttccgaccaggagccggtgatcccggaaggattatggcgcaaatgtaataagtgcgggcagccaatctatgtggaagacgtaaagaacaattactacgtatgtcccaagtgcaacggctatttccgtgttcatgcataccgccgtatcgagatgctggcggatgagggaacctttgaggagtggaacaaggaaatgcctttctccaaccctctgaattttccgggatatgagaaaaaggtcatagctgccagggaaaagagccgcctcaacgaggccattgtcaccggcaaatgcaaagttgacggaaatcctgcggtagttggcgtctgcgatgcccgtttcattatgagcagcatgggccatgtggtgggtgagaaaatcaccgacgcagtagagcgggccaccagggaaaaactgccggttatcctctttgcctgctcaggcggagccaggatgcaggagggcattgtatccctgatgcagatggccaagacctcggctgccttaaagcgccatcatgaggccggccagctgtttatcagcgtacttaccgaccctaccacaggaggcgtcacggccagctttgccatgctgggcgacattatcctggcagagcctcatgcgctgattggttttgcgggtcccagggttattgagcagaccattgggcagaagctgccggaagggttccagcgttctgaatttctgctggagcatggatttgtggataagattgtggagcggaaggaccagaaaagggtcattggccagattctgtatatgcaccgcagccacaagatgaatatagagttaaagagtccggtggagacagccaggacatttgtggataaaccatcccaattgcaggcggatagtggaaaaactgcctgggataccgtgcttctctccaggaagtccgaccgtcccgttgcaacggattatatcaacgccctgtttgatgaattcattgaattccacggggaccggtattttaaggatgatggagccattgtgggcggcgttgccatgttccacggtatgcccgtgacggtcatcggacagcagaagggcaagaacaccaaggacaacattatccgcaactttggaatgccgtcccctgacggctaccgcaaggcgctgcgcctgatgaagcaggcagagaccttcaaccgtccggttgtctgctttgtggatacgccgggagccttttgcggtctggaggcagaggaaagaggacagggcgaggccattgccagaaacctgttcgagatatcagacctcaaggtgcctgtgctctccattgtaatcggagagggagggagcggcggagcattggccatggctgtggccgacgaggtgtggatgctggaaaatgccatttactccatcctttcaccggagggatttgcctccattctgtataaagacagcaagaaggcgccggatgccgccaaggtcatgaaggtgacggctaaggaccttttacagcttgagctgattgaacgcatcgtgcctgaggaagaaccagcatgcacggacaatctctaccgtctcgctgaatatatggacagcgccatggcagagttctttaaaacgtatctcgccatgagcgatgaggagcttagggagcacaggtaccagagatttaggagaatgtaatgagtgagttaaaaccattggtaatcggggatttagtagttgaaaaaccaatcatccagggaggaatgggggtaggcatcagcctgcacaggctggccggtgccgtggcaaaagccggcggcatgggcattatctcagctgcccagattggtttcagggagccggatttcaccaccaatttcgtggaagcaaacttaaggtccatccgcagggagatgaaactggccagagaaatcgcaccccagggcgcgattggtttcaatatcatggtggctaccaagcactatgacatgtgggttaaggaggctgtgaaggcaggcgctgacattatcatatcaggtgccggacttcctgtgtccctgccggaatacgtggaagctgcctatgccgagatggagaagaagccggaccgcaggatcaagctggctcctattgtatcatctgccaaatcagccatggtcatctgcaagatgtgggacaggaaatgccacattgccccggatctggttgtggtggaaggaccgctggccggaggccatctgggattctcactggaccagttatctgtctatggcgccgacacttccgatgtgccggccacctatgaccgggatgcctatgaccgggaggtaaaggctgtcataaaggtagtggaggaatatggagccaagtatggcaggcatatacctgtggtcactgccggcggcatatacacccatgaagatgtgatgcaccagcttgagctgggggctgacggcgtccaggttgccaccaggtttgtgacgacccaggagtgcgatgcctctgacgcctataagcaggcttatataaatgcgggaaaggaagatattgtcatcacccagagtcctgtgggcatgccgggaagggcaatcttaaatcctttcttaagtcagataaagggcggcaccaggccggccatcaagtcctgcttccagtgcctggagcactgtgacatcaggaccattccctactgcattaccatggcactggtatatgcggcggagggcgacacggaccatggccttttgttctgcggaagcaatgcttaccgtgcggaaaaaattgatactgtggataacgttatgaaggaattaacaggagagctggcttaatgccggctcttttttccttattttacaaggaatttatgttatccggtacaatgggacaacccttatccccagataattaacaaagatatccacaagttatccacattatccaccatcggatatccagggctgtcccatgaccttccatctgtcatttttattacggttctctttcattttccgcctgcccattgaccctcaaaagggtaggtcttaaaatgtagctatgaaaaaactgaatgaaacagagggtgtgaagatggaaaaagcgttggcggagaaaacaggggggtatctcataggtgacgttgcccagatggtcggtctgagcagggatgccctgcgtttttatgagaaaaaaggaatcatccgtgcagataagaaggaaaatgggtacagatattattcagaggatgatatctacagattgatgtacatactttatcacagaaaaatgaataccagcctggaagagataggaggtcttatgagcggacagaactccacatccgctatgagacagcatgtcaggcagcgcatggccgaggaggaggaagccctcaggcggcacagccaggcaatcatgaggcttaagctggtggaaaaggatataagccgcatagaggcgtgtatgggcagatattccataagaaaattccccaaagcatttgtcatggccaactgttccgacctgcaggaggggttaagaacgtggtttaagctgtcctctaccattccgggactggatatggcttatttttataatgtactcacatacacgggacaggacctggaggaaaaaggaacccagctcctgctctatgagggactggagaaggggctgggccaggaatttgaccgtagtctgtactctatgacggaggagccggaatgtatctataccattattgaatcagaatatactcttccggattttgatatgattcacaggatggtccaatgggcccataaacatggcctggagcccatggagtgcgtatacgccaatgatatgacgtcctttttcgcaaaggacaggactacatattgtctggaaatctatatgccttttaaaaggattgcatcgccggtatgatacgggtaagagttcttacccgtatccgtatccgttatcagccggtgtatccttacccgttatcagccgcagtttccttgccgttgtcctcatcctttctgggaatgccgaagttctggatgaagtcaatcataaaggaggatacggtcactgttataagcgaatatacgatacgtcctgcgggaatatacgacagggacagtaccagtacggatacgtccgtcagcaggtatgccctggatatgcggcagcccgtaaccttggagatgaccagggccagggcgtcgtccccggcgcaggaagctccctggcggaccaccaggccgcatccggtaccgatgaagcatccgcctgccagagccgccagaagggggtagtcagccagacttggaagtaccgggggaaacagttcccagagccggaagaatccggccatacatatggttgcgaagatggaggtcttaaggaattccttgcccaggaaacgaaagcccagggcatagcttaaggcgtccagcacaggtgacagtatggaagatgacatgccgaaccagaaatgaaagagcagaatcaatcccagaatacctccctccgttatatccgcctgctggtggatattgtagatgccaaaggtggtaatggctgtaccaaggatgatggataacacagtctttgggggaaaggttatggataattcctgtacagcgcggcaagccagcttcttcagctgcttcataataaaacgtcctttctgtaaataggttataaaaccggttaggggcggtccgggaatccaagggattccgggccgccctgttatgttgtactaccagtatacctcatgtaccccgggggatgtcaagtggggattttctccattcggatgtttgattttcattatacggatgttttcatgtaatcccacctgataattcatccggtaattctgcaggtgacttacctgcgcggttctggcttgactctcccgttagtccagtttttccgtgcctgaatccaggattctgcccttgctgtctgtcttgtagtatacatcgtcggaatcctttacattcttcttgttctttaccagcttaccggaagtactgatgagataggtttcatccttataggtaaccggctgatacttggtgccctcctcggcttccagccttcttcccttcacgtagatggaatcaccgtcaatgccgtctgttccggcccctcttttgctgccggatttctcaaagctgtagtagtacttgtcgccgtcgatttccatggtcatggtgcctgttttcatggcgccttccttaggagaatcaccgaaatagtatacgaatacgccgtcctcgtcctcatccgggagttcgtccacgtcctcaatctcctcagcagatcggatggtctttccattctcctcaaattcaatgcggtagagaccctgaagcatttttccgtttacatcaaatccgtagtactgtccgtttatttttttaatctgggccgttaccaggctgccgtttgactctgcgtagaaccagtgggcctcatcatcgtcgtgggcctccggatccacatcctcgctgggaacggtcttaaaccagccggtggacatccagcattcttcctctgtgttatagtatttgtttacggtagaggaggaggcggtgccgggattgttataccattcaaagtgggctgcgccgttttcatcaaatcggtatttccggccgttgattttcttggagtcgttgtccgcggtctttttgccgttggtggaaaaataaaaccagtatccatccccttccctgtcgtcgtcctcgtcatttacagctgtgatatatttccatcccgtggccatgcggccgtcgccgttatcgctgcaataatacatgccgctcttccaggcatcgtcatccgtcagcatttcgccgctctcgtcaatccatccgtagagcatgcgtccttcgtcgtcaaaggtaaactttgcctgtccggtggaggtgggaagggtaacgaacttcacattgtcactgcttccggatttctttacagccttgccgttggactggaaatagtaccaccactcatccggttcgtctgagcctgcgtcttcattttcaatagagcgccactggttagtgaccattgcccctgctgagttgacatagaaataattgtcatcgtcctcaatcagctggtttttagccatgtttccgtcggaatccagatagaaccagttgttgccggatttcttgaatacatcggtggctttgctgccatcgttgttataatagacccattcgccgttttcctcagcccatccggtggctgcaaatgataccagtgcgcttcccagggtcagggccatggctgcacatggaatcagaaaccattttgcctgtcttttcataatcatgtctcctttcagtctgtcattcagtccattgatttcaggattatcaccttaattgtcttttagggggatgcggctgccgtttcgccggtgttctggccggcgccgcacgttgtcatcactgacatggtgagaatatactatggagccgctccagggtcaatagaagttatgtaaacgtaatgaactgtaaattttacgcaagcccatgtaataattcttacggagaaagcgcaattatgaatatttgggaatgattgggtgaaatagttcatatggggtgctgatatgggaatatatagcgggaccgggaatagaatggaataagaatgccatgaaacaggcggagaaacatgctgaattatttatgggcaggaatgacactgacaggaatactctggggggcgcttcacggtcagatgacggcggtgaccgatggggcaatccaggcatcgaaggaggctgtgacgctgtgcatcaccatgctgggtgtcatgaccctgtggacaggggtgctggagatcgggcaccgctccggactggtggaccagctggcaagaagaatgggaccggtactcaccttcctttttccaaggctggacccggatggggaggcaaggaaacagataagcgtcaatatgattgccaacatactgggcctgggatgggccgcaacgccggccggcttaaaagccatggaagagctgaaaaaggtggaggaggagcgcgggatgggcggtgcggccaggcaggaggggactgccagcaatgagatgtgtacatttctcattatcaacatatcctccttacagcttatacccatgaatatgattgcatacaggagccagtatggaagcgtaaatcccacagccattgtagggcctgccctggcggctacctttatcagcacagtggttgcggtgatattctgcaggattatggaccggtaggttcaggcggtgcattgtagtatgccgaaagagacggtatactggatacaacagatgaagggaggtggctttatgttccgcatcggagcattttcaaagctaaccagggtatcggtaaggatgcttcgctactatgataatgcagggcttttaacgcctgctgttattgacaaatttaccgggtaccggatgtataccacagaccagatacctgtcctgcagaaaatatgcctgctcagggatatgggctttaatgtgacggagatcggtgctgtaatggaatgctgggagagcagcggtgtgacagaatatctggaggacaagaaaagacagcttttagattcaatccggctggaacagcagcgcatacggaagatagaaattgccatgagagattttaaagaaagcaccattgaaacccattataacgtgaccataaagtctgttcccggctgtaagattttgtccctgaggaaaactgtggcagattattattgtgaagggaggctgtgggaacagctctatgcctttgtgagggaagaacagataaaactgagcccaggcactaacaatcttgccatttatcacaatggggggaccacggaggacggagtagatatagaggtgggggttatggtggaaagagaaggagcggacaagggcggtttctgctacagggagacagagcctgtggaggatatggcttgtattatggtctatggtccatatgaaaatatcggattatcctatcatgcctttgcctgctggatggaagaacaccgccagtatgaaatagccgggccaagccggcagatttgccatataggctcctgggatgaatctgattcccagaaattccttacagaagtacaaacaccggtccggcgcatattgactctgacaccgtgagagggtttaaactcagcctatatcaagtgaaggaggtttcagtatgaaacaatttacagtaaaacagattggcacaatggaaatggacaaggatggtatgtacgtaaagctcctgccggaatacatcccggcccttaagtccctggagggctttggacatgcagacatactctggtggtttgacggctgcgacgatgaggaaaacaggagcgtacttgaggcggaaagcccctataagcaggggccggatacaatgggcatatttgcaacccggtccccccagaggcctaatcccattgcccttagcgtggtgcagattctctatatagaccatgaggccggtgttatctacattgcttatgcagatgccaggcagggaagtcctgtgctggatttaaagccgtacacccccagtctggaccgggtagagcatccccaagtgccggactggtgcggccattggccccggagcctggaggaatccggggactttgactgggaaaatgaatttaacttctaggccggaggtcatcatatactcttaagttgaaaggaaacattaagaaaacctcaacacgatggagaggcctttgtgctaaaataaaaaacatatggattaatatggaatttgagagtatgaggtggatgatatgaggatgttgggaaaggccggaaagatgggagagattggagcgtcggaaaagacgggagggctgggaaagacagaaggaccgggaaagacgggagggccgggaaagacgggagggccgggaaggaccggagcgtcgggaaagtctgcaaagccggtaacgaagggaaagagggcggcagcatgcgcggcggcggccattataggcgccatgtcgctgtttgcgccggcagcagcttacggggcccagccctggtcactggagaacgggcagtatgtggatgcgtcaggagcgcccatagcaggggcgctggaaaagggcatcaccgtgaccaagtaccagaaccgggccaatgaaaacggtatagactggtccagggtggcgtcggacggcgtgtcatttgccatgatacgggtgggctattataaggataaagacccttattttgacaggaatgtcacagaggcatttgcaaacggcattcacaccggggtgtttttctatacccaggctctagacgtacagaccgccattgacgaggccaatttcgtgctgaaggtaattaaggatttccccatatcctatcccattgcctatgatgtggaatcccagcatcttctggacaacggactgaccaggcagcagataacagacaatgtaaacgcattctgtaagaccatttctgatgccgggtatcatccggtggtatatgggaacaatgaatggctgaccagaaatatggacactggccagattccctatgatatatggtatgccagatacgggactgtgaacagttatccaaaccgcactatctggcagtgtactgataccggttcagtggatggcattaacggcaatgtgaccatcgagctggcatttacggattacagtgccgtgattcctgctgacggatggaagcatgtggacggcagatggtactacatgaaggggtatgtgaagcagacaggatgggttgaggtggatggtgcctggtattatctggacaccaatggcgtcatgattcatgatactaccatggatattgatggtgtgtcctatacctttgactctaatggggttatggcggaaccgacaagataaaaaaatatgatttaggaaggtttcataaaataccggcataccagagagtttcacccttctctgatatgccggtagttctaggttataatccgaattcactaaacagacggtcctggtactcacggtccgatgcagcccgtacgatgtcctccatccttccggcttctgccagctttacaataagagcattgacacgcccctgcccctgttttacaccttgctccattccttgttctatacccttctcaattcctttctctatcccttcctccaaaagcatctttcctaatacagtcattccaatcctctcctttattcgctctaattcatttctgctcaaaaactttacagccagtgcatacagtacggactgcatcctttttctctcatcagcgcttacttgcagttcttcacactggagaaactccatgccctgataaatacgctcactcatttccatatcccctgacatcaatggcgtcaggagcaggggaaaaatgtcacggcggcgcagtctcttacctttatggattttctgtctcagttttttaaagaccttatcggcattcctgtcccttagccgtaccacctctatcctgtagacactgtccccattaatcagttcctttttctggatctttgtattggaagtacagatcacggttgtcattacaggagcactgtatatcattcctatgtatgcttcatattcccggaagcgtcttaaatcctgttccgtgatgttgtcgctctcaaactccagatgccgtattgctcccttttccatgatgaaattaaaatcctcttccagcctgcgcatctccagatgaacatgctccgtaggcgcaactgtaaggatttttccctttacgcctatatagggaagcagatcctccccgaaaaactgagctgctgttttcattaccttgtcctccaactgaccgaatccatttgtttctccctgctcacgcaggtttctttcacccatacagcctcctgttccggcaagccatataagaacctatccccattataacgttttctcttaagccagacaatagcacctttgccttttatatattagcagattcattgtgtagtttatgatagaatggaaatcattgcccgacacatacggggcagaatactaagatggatcattaagacccagatacatatagatattataaaatataggataatgagcgacagatacttatattcctctatcgtctggttgttacaatataacattatatgcacacaaaagcaagcatcaagggttaatttataaatctgcagaattatgaatccattacgaatcactgcatctttgcatgaattaatacttgacaaattgcctccccggacatataatcctagaaaacctagtgacaaactatgaataaataagaaaggccctgcacgcctgtgagggaacggtggaagttatgtctaagatttataagggagccattgagctggtaggcaacaccccgttggtagaggtgaccaacatcgagaagaaggaacagctgaaagcgcgtcttcttgtaaagctggagtactttaatccggctgggagtgtaaaggacagagttgggaaggccatgattgaggacgcggaacgtaccggccggctgaaaccgggttccgttatcattgagcctacctcaggcaacacaggcattggtctggccgctgtctcggcagtcaagggttacaggatgatactgaccatgccggataccatgagcgtggagcgccgcaatatactgaaggcatatggggctgagattgtgctcacacctggtgagaaggggatgagcggtgccattgagaaagcggaggagctggcaaaagagattccggacagtttcataccgggtcagtttgataatccggtgaatcccagggctcatatggagagtacgggtccggaaatttggcaggacacggacggacaggtagatatatttgtagcttccgtgggaacaggaggcacccttacagggaccggaacatacttgaaggaaaagaatccccgcatcaaggtaatagctgtggagccgtccacatcagcggttctttccggaggaagtgccggccctcataagattcagggaattggagccggattcatacccaaggttctggatacccgcgtatacgatgaaattataacagtggataatgaagcgccctttgcaacagcaaagatgctggccaggacagagggacttcttaccggtatttcatcgggggctgcactgtatgctgcgattgaggttgccaggcggcctgagaatgagggaaagaccattgtcgcactgctgcctgacagcggggaccggtattattccacggctttgtttgtggagtaggggagcagaatgtggtgaatcctaaggcaacatacaaccatatacaatattataacgccaggctgtggaaaacatggtctggcgtcattgcgcggcggcggtaatcgtgatatgcttaaatccataaacaaaccgtatagggggataacgcaatgtcttttaaactggtaaaatataaggagccggatttcagccaaagccaatttacggatgcaccggacgctgtgacggccccggcgcccaaggataaggtggcgccggagcattaccatgcaaccaccatttttccggagtattttaaggttaagggccagtggctgctggcagaagagagccgtatggactgcgtggcagtgtacgagaatgggaagatttatgtcagggagtttaggaacttaaaacagggggacctggtctttacggggaggaccgagaactgtgaggacggtatttttgtatatccccacggctttgacgagggagagggaggccatgacgaagcatttgccttccgccagagacgctccagggagacggccttttccaaggattatgataacatttatgagctgcttcgccatgagagggaacacggatatgtggtttgggtcatgggacctgcctgtgcttttgattccgattccagggaagccttttcaaaactggtgatgaacgggtatgtggatgcccttttagcaggcaatgcgctggccacccatgacctggagggggcttacttaaacactgctttgggtcagaacatctatacccagtacagccagccaaacggtcattacaaccacatcgacaccatcaaccgggtaaaattccacggctccattccggcctttgttgagaaggaggggattgataacggcatcatatacagctgtgtgaagaaggatgtaccctttgtgctggtgggttccatccgtgacgacggcccgctgccggaggtgtacgccaatgtatatgagggccaggatgccatgagagactgtgtgaggaaagctaccacggtcatctgtatggccaccacccttcactccattgcaacgggcaatatgactccttccttccgtgttatgccggacgggaccatacgccaggtgtatttttacagtgtagatgtgtctgaattcgccgtgaataaactgggtgacaggggaagcctgtctgccaaaagcattgtgaccaatgtgcaggactttgtagtgaatgtgagcaagggccttggcctgtagaagctggaatacgcagcttttcagggcgtaattatgagaatgatatggttatgaaggggcatccggaactgctttggtttcgggtgcctttttggcgttacctgttataccgaagcattacagcagaataatccgccaatgaatgggaagcctaccccataagggacagacccgggacaacccaaggaggaacggacatggctaagagaataatcacagacaatatgataaaggactattgcggggagatgcatcagaatgaaatgagcagcggcaccattaagaaatatttttattatttgaacctgttcaggaaatatgccgatggaaagccggtgagtaaggaattggtgattgtgtggaaagatacgttaagggaacagttttcaccggttacagctaacagcgcccttgcggcactgaacggcttctttaagtggtttggctgggaggactgcacggtacggctcataaaagtaaagcataggatgttctgttccgggcagagggaactttcacgggaggaatatatacggcttgtgaacgttgcccgcggtgaggggaatgagagacttagcctgctgctgcagaccgtatgctccaccggaatccgtatatcagagctgagcttcattacggtgaatgcggtggataagcaggttgcggaggtggactgcaagggaaaggtaagaaccgtattcctgaccaacggattgtgcaggcttcttaaggcatatgcaaggaagagaaacattatatccggtatgatattcgtcacgcgcagcggaaagcccatggaccggagtaacatatggcgggagatgaaacaaatcagccataaggcaggggttaatccggacaaggtattccctcataatctcaggcatttgttcgcaagggtgtattacagccaggaaaaggatttggtaaggctggcagacatacttggacacagcagtgtcaacacaaccagaatttatacaatggaaagcggggagaatcacctgagacaactggagaaaatgaatctgctgatagacagatacaacagaatcccccttttgttgtaaatttccgcgccatctgtctccccccgcccatccgggcataattttgcggttcatccgcactcaattgcacccacaaaaaccaggccggttagacatggctttaaccagcctggtttttgtgggataacagccgtaaaactcagcagcttttcacattcatatggcatacgttccaaatatgtagtataataattcttaacagaactccggcgtttacaacaaaagggggattctgttgtaatccggaaatcaaagagcataagagggaagaggagctgagaatatgggcggcacattagtacaggatgaagaggccataaaacgaattgaggaactaatcgtatccgacagggcaagtacaatgttggtatgtatccagggcacaagggaaggggagccttgcggggaaatctacaactgttatctgagggagccggtattgtttaacggggccggagacatggtattgaagctggatgagatgtgcaactgggtgggggctcctcagtccactacagattacaggttcctgaacagagagatggaaaggcagtaccgggaggacagtgcccgtcatccccaggtcagcagggataatctggtgtacagcatagaccgtattcctttccagcatgccttaaaggccagggaagtgctggtggtctatataaaatacagacagaattccagtctgcagggaagtgtgcgcgggagaatcacaaagggagaggttgtcagcttcaggagcgctctggaactgatgcggatggtgaggatgatacaggtgtagagggcttttagtaaaaatttagcaaatgtgtaaaatgtgatctggatgtaaccgccatggtatatactttgcaggtacccatggcacaatggccggaggaaccggcccaaataacgattttggatgaggatgtgcctcttgcgcctctgccaaagacaggggaagggccccgcagttattatcttgcagcggtgatttcctctttgttatccggattgtatattgcccttcatggaagaaagagggactcatgacggattgcagaatggatataccgtaaaatcagaactaccgtaaaatcagaactgccgttccgctctttggacggcagtttttatgataacaggggagaaaaggcgcaggggcatttcccgtcatgaaacaaagatcaggggaataagatgtaataaacaaacggacctggaactgatatatgaaattcctgattttcctgtcagaggcaatggtccctctgatgattttttatattgtgggattcggccttttatcgggccgtccggtgctggacgacttcatcgacggggcaaaggacggcatgaagacagtggcaggtatcctgccgaccctggtgggacttctggtgtcggtgggagtcctcagggcatccggatttctggattttctgggagagctgctgcagatgcccgcggctcttctgcacataccgccccaaatcgtgcctgtggtcctggtgcgtctggtatccaactcagccgccacagggctggtgctggatatatttaaggagtacggcacagactcctcgcttggacttattgcgtctgtactcatgagcagtacggagacagtgctgtactgcctgagcgtatattttggcagcgtaggcattaccaggaccaggtatacattggcaggggggcttattgccacggcggcgggagtggcggccagcgtggtgctggcgggtgcggtcagataaagctgtgtccggcgcttgccggcgtgtaaaaaaacattgcaatatcaagggttattgactataatagccatagtaaaagggaatccgttgtatgtgcgccctgtataggattacatcagggccttagggtatgcctgcgtccagccggaatgagcattacggctggacgctacggccatacactggcatacagcgggtttatgctgtgaagagaagaggaatgaggaatgaaacagtatctgagcctgcgggaacagtatccccggtttgcttacagaggatatgagatagaggaaaatgacagctgcctgaagatcacataccggtttgagaccctgggactgtctgagtttgcgccggtatgggtgtttcccaagacagagggggactgccgcagatggtcagaagacaggcttatgcaggacatgatattttccctgggaatggtggagctggtaagctactggaaaatagcctgcccgcctatagtgacagtggaagccggatggctgaaccaggaccagattgactggtggaaggatctgtattttaacggattgggtgaatttttctatgtgaacggtataaaggaagcggatcccaatcattttatggatatccggtgcgttggccagcatgagactcagtgcgcgtgccagcttaaagatccctgcacagaccaatataaagagcggcatgaggaatgtggtgtggaaacagatgggaagggtaacggcgtcctggtccccataggcggaggaaaggattcagcggtgacgctggagcttctgcgtctggcgggaaggcccgtctgcgcctatattatcaatcccagaggggccaccatacacaccaccgaggtggcgggcctggacgcggcccatgtcataagcgcaaagcgcaccctggattccaacatgctggagctcaaccgtcagggatatctgaatgggcatacgcctttttctgcgctggtggctttttccggcattatagcagccaggatgcatggcctgaccatggtggccctgtccaacgaatccagtgccaacgagagcacggtccagggaagcacggtcaaccaccagtattccaaaagctttaagtttgaggaagatttccattattatcagaccacatacctgaaggggagcgcatactacttcagtatgctgcgccctttgagtgaattccagattgccaggttttttgcggggcagaagcagtaccacggcatattccgaagctgtaatgccgggagcaagactgattcctggtgcggacactgccccaagtgtctgtttgtgtacctgattctgtcgccctttcttaagcctcaggaagtcagggatatctttggccggaacatgctggacgattgggatatgaaggaaaccctggaccagttgattgggatagaggaagagaaaccctttgagtgtgtgggcagccgtgatgaaatcaatacagccatcgtacttacgatcaaagggctggaggatgcaggtgaggcgctgccctatcttctatcctattataaaaccacagacctgtatcagacctacagaaccaggggagaccagtactcatcctattatgacgggaataacctggtcccggatgaattagcggggctggtgaggaaatgctgtacagacggcttgcaaggagaacagacgtgatagagaagatagagccctggattaaggggaaacgcatactgcttctgggttatggcagagaaggacagtccacctggaatgtcctcaggcggctgggaacatataaagttctggacatagcggatttgaaggatcctgctgccttgcctgaggacggtacggtgtggcataccggcccggattaccagaaatgtatggatgattacgatgttgtatttaaaagcccgggcattgtcctggagcggcctgaaaatgaatacaggtgcagtatattgtcgcagacagaggtgtttttccagtgtttccgggatcagattatcggaatcacgggaaccaagggcaagagtacggtcacgacccttctgtatcacctgcttaagcaggcgggcatggatgcccttctggtgggcaatataggtataccggccctggaccacatggaggaagtgaagccggacaccaggattgtgtttgagctttcctgccatcagctggaatatatgacggtttcaccccatataggaattctggtgaacatccatgaggagcatctggaccattacggtaccatggaaaagtatgtggaggccaagcatcatatctttaaaaaccaggggccggatgacattctgatctgcaacgtacagtgcctgccggaggagggaacctgtccgtccggattgataagggcaggtatggacggcagcggcaaagagctggacgtggttcaggagcaggacggaacctgggttcacttccggggaaagtctttttgtatacccacggatgaaatcaagcttctgggacagcataattattttgatatcggcgtggcgtatggagtgtgcagcatactgggaatggatgaccaggtttttgcccgggggcttaagacatacgaaccccttccccaccggcttcagtatattggggagcgggagggagtgaaatattatgacgactccatctctacgatttgcgataccaccattcaggcccttaagacgctgaaggatacggatacagttctcataggcggtatggaccggggaatcgactacagggaactgattgaatatctgtcggattgccaggtgccccatatcatcctgatggaggccacgggcaaaaggatataccaggagatacataagtattatcctgaatttaagaacagggccaggcttatactggcggagcatctggaagacggtgtcaagcgggcgcgtcagataacgagacccggcacaagctgcgtgctgtcgccggccgctgccagctatggcatcttcaggaattttgaggaacggggagaaacattttcgcgtcttgtatttaataagtaaatctggataaaaatgtaaatgaaacaaaaaaatcacaaccttttaagaattttataaggatttagggggttgtgcgaacacttaaaatactgtacaatcagtaagaagcttttgaagcagaaagtgaaagggagaaacgtgggagcttacgagacgctgaatgaagttttggttagcctgttccgcgatgtcaatgatatagagcagaaggcaattatcacctcggagtttagtgatattaccaataacgatatgcatgtcatagacgccatcggcatagacaggccaaagaacatgtcatccattgcccgggaactgtcggtcacggtgggaacattaactatatccgtgaacagcctggtaaaaaagggctatgtagtccgtaaccgcagcagtgaggaccgcagggtcgtattcatatccctttcagaaaaaggagttaaggcttattatcatcataagaagttccatgaacagatgatagacagcgtagtgaaagaattgacagaggaagagctggaggccctggtaaaggcgctgacaaagctcaacacctggttcagaagtttttaagaggattatttaaggaggctttacaattatgaaaaaatggttgattggtgttatgaccgtcctgatggcagtatccctggcagcctgtacacctaccactgaaaaacagaaaaaagaaaccactgctgcggcagcagctaaatcccaggaggatatggttcccccaagcacaggcggggccagcgataaagttccggatcccaacgttatgccggtagctgtgatttccatatatcacggaggcggcggaagcctggtgcaggatatggattccctggacacggaaggcctggacgcacagctgctggtggacaagctgattgaatatggtgtgctgactgacggcacagaggtcctcagctttgatattgagggaaaagatgagaacgcggttggaaccctggacttaagtcaggctgagagcgcagagggctgttccgacaagatgttcctcactgagattggcaatacattcactgaaaactttgagctgtccaagcttaagcttaaggtgaacggcggcaattatgaaggcgatgacattaagcagggagatagcgattatcttacctataacgcggactatgagtctgttgaataaagaagtgaaagaggcggctgtcctgtaagtggaaactccacttaagggtagccgcctctgttttgccacaggttaaaaaaccatgcccctttctttgtctggaaggaggcatggtttttatagtataagatttccaatgataaattatcattattaagtatgcaggtgataagcaggcctgattttataatttagccatggctgcttcgtctgcaacaactattacatcgttatgcagctgaagtatggatgcgggaacatgaggagttacagggccgcagagcacatcatggagaatctgagccttgtcagaaccgctgacaaccagaaggatttttttagccttcataatggttccgatacccatggtataagcctgcttcggaacatcatcaatggaagcaaagaaacgcttattggcctcgatggtgctctgggtcaggtccacacagtgagtggtcttggcaaattcttcgtccggctcattaaagccgatatggccgttatgccccaggcccagaagctgcaggtcaatgccgcccaggctcttaatcacgtcctcatagcgtgagcactccttatcgctgtcaggctgggtgccgtcgggtacattggtgcagtccatgttgatgttaatatgcttaaagagattgttatacatgaagtagtagtagctctggtcattatccctggtaagtcctctgtactcatccaggttcacgctctttacaccggagaaatccaaatcacctttgttgtaccattcgatcagctgcttgtaagtgccgattggggtggatccggttgccaggccaaggacacattcaggtttcatcaggacctgggaggcgatgatgctggctgccttgcggcttaattcatcgtaatcttttgctttgtagattttcataataattgccacctttccatacattattagtagttgcggtgccccggatttccagagggtcactaatttggaaaaaatttttataaatctttaaatataggataacattttcctaacatactttcaaggggtaaatgcataaaatatttataaaagcagataggccgtgttcagggcagctgcagattatgggtgcgaggagtgaaagtatgaccaattatcggagattgatatcttatatctacgcctatgaaggcgaggtaaaaggaaagaatattgggtttgccaagctggaatcccggaatgggcaatgcaagctcagcgtaaatgtaaagaaggtttacgttggaagcagcgacctgggggtttatctgctggccccgggaaaagaaatttttctgggcagtatatttatccgcagcggaggcggtgagttccgcgccgtggtaaatgtggaaaatgccgctgattcgggctgcagcatggaccaatgctatggcctgacgattcatgaacagggggatacatggcgggcatatacgaccatctgggaggatgcggtggcccatgcagcggaagtggagctggcggatgtgacctccagtaaagtaggagatgcagaagcgcagatacatagaaaagtggaagaactgaatcaggagctgcggtccggtgaaaaggcagcagaaggcggagacggccctgtgctcagcagttctccggcagaggcgcgtcagatgagtgctggtcgtggggctatgaagaacgcggagacaccggagggtgcggaggttgtgcaggagacagaggtattggcccaaacgtcagaagaagtatatcagacggagaatgaggccaatcagatgacagaggcattggatcaggctgcggaaaaagtagtcggagcggaagagattttaccggagtcaatagaggcagatacggtcgaaatgtcccaaaagcaggagaatcaggatgacagggacgatttggcgctggaaccagagctgttgccggatgataaagacagtatggagttggagccggaatccctgacagatgggatgccggatgaaatgtcaaatgaaatagaggaagcgcaggaatcaggaggtatcccggattcccaattagagagccagtcagagaatacggcagagtcagagataacggcagaattgggaaaagcggctgaagaacataaggcaggttttcaaaatagcggcctggcaggaatcacaccaaaaagagatatggaacagatggatggtatgatgacgccaaacatgggcagagagcaggaaacagaccatagagcctggagcggcaaaggggattttggtgaacagccgaattctaagcacggctgggatgaaaagaatgttacatctatcagaaaacagctttatgaggaaaatgaaagcgtgccccgtgagcttcaaaccgctcatgatccgttgaacatgggacttcccagacaggaaggtatggttcctgagacccgtattcccctgcagccagataatatgccggaaaacaggacggttcccagaccaaacattatgaccaggcctggaatgccccgcaggcatatgcctgctgggacagtgcgtacgggttcttccggggggcaatcggaccaggaacagatgatggaccagtatcagttgaatcagcagccaatgccagtacagcagccaatgccaggtcagcagcaagtaccgtgtcagcagccaatgtcgaatcaacagtcaaggatgctccgccagctgatgccaagcaaccagactatgccgtcacgtcaacaaacgccggggcagagttcgctgggccaacatccagttacaaatcggcagccagtgccgggtcagcaggcgatacaaaaccagcagccgatatcaaaccaacagccaatgccaaaccagcagccgatatcaaaccagcagccgatgccaaaccagcagccgatgccgggtcagcggccgacatcaaaccagcagccgatgtcaaaccagcggccaatgccgggtcagcagccaatgccaaaccatcggccgacatcaaaccagcagccaatgccaaaccagcagccaatgccaaaccagcagccaatgccaaaccatcggccgacatcaaaccagcagccaatgccaaaccagcagccaatgccaaaccatcggccaatgccaaaccagcggccaatgccaaaccagcagccgatgccaaaccagcagccgatgccaaaccagcagccgatgtcaaaccgtcagccgttacccaaccagcgtcccggaagccagatacaaaaccagggcagacagatgcggccggccggacctgaggcaggtgataacagcgaagcagctgggcaggcggaggaaagagtgcctgtggttgatgcaggcgaagaaactctgatactgggaaatcctcaggatttagaacggctggagcaggaagaacagcaatctgacttcccgggcaggctgtgggagggcttccgtaagcggtatcccaagatacaggcctttgacagtgcaaatgggtgtgagattctgacaattaaaccccaggatatcggactgcttccaagggagaactggaattatggcaataacagctttctgctgcacggatactacaattaccgttatctgatattagcccgcatcggcgatgaaacaaagggacgcacccggtacatacttggggttcccggcaattattacagcaatgaaaaatacatggcatccatgttcggcttcccgcatttcgtgctggcaagaaaacagccgtcacaggacggccgctttggatattggtatacagatgtgcggctggaaaaccaggattaaaaaagtcacccctaccggtgcagtcagaccgcgccggaaggggtgaaaatcaaggatacattagatctaacattgtactaaactttgcgggaatccgtttatttgcttaggacgcgtttgaaaattcattccagctgtctgccataaggaatccgccggaggtatgaccctccctgcatcctcaggacaaagcacgctctagtaatcaattcccctcagggaaacctgccccacataggggcgcaccaaatcagcgaatgccatcatttcatcttttgaaaagtctgaatagagtccgggaacaagtacttccccggactccgtgaagcactgcaggtagtaatccggacaccccttaatccacggtccaatctgtctgaaatcatcagatgtgtgaataccgcggacaacggttgttcggaattcataggggatgctgcctgacagcagaaattcgatgctctcatctatccgttccatggaaaggccggaaactccggctgcttcttcatagtgattccgcccggctttaatgtccattgccacacaatccaaaagccctttggcgcacaaatcttttaatattccaggcatgtaaccattggtatccagcttcactgccagtcccaggctccgcaccttccgtatgaactcctccaggtccggctgcagggtgggttctcctccggtgatacaaacaccttccagtacccgtttgcgtttttccaggaatgccagaatatcctcctggcattcatattcttctgcgtctgaacccagaagcccgctgttatggcagaatggacaccggaaattacatcctcctgtaaatatagttgcggccactctgcccggaaagtccagcagcgtagtcttttgcagtccgcatattttcatggcctcttaacctgtcccttttcaaattttggtttattctatataataaaaaagtataacatacataaagctttaaaaaaagaggaatcaattcatggcaaaagggccatctgatataggagagaaaaatatggcattaaaacaggaaaatatggcgtcaaatcagaaaagaatagaattaaatcagaaaaccgtagaaacaagccaggaacccctaatgctaaaccgggaaaaccgcaacagagaagcagcagaaatagaagcagcccgtttaaaggaacaggaaacagaagcagcccgtttaaaagggcaggaaacacggcgcagaaattatgaaaagagaatggagaagcagcgacttgcagctcttgcggcagaagagcagcgattgaggcagagacagaaggatgagggatttatgagggaggcgcttcgacaggcccaaaaggcggccgccatcggagacgtgcccatcggatgcgtgattgtccgcggggataagattattgccaggggatataaccggcgtaatgcggataaaagtgtgctgtcccatgccgaaattatttccattaaaaaggcatgcaaaaaaataggagactggcgtttggaggactgcaccatgtatgtaacgctggagccatgccccatgtgcgcaggggcgattgtgcaggcgcgcataccccggattgcagtgggctgcatgaaccccaaggccggctgtgcggggtctgtgctggacatgctccatgtgccgggctttaatcatcaggcggaggtgaccgagggggtgcttgagcaggagtgttccaagctgatgtcggacttcttccagagcctgcgtgaacgcaaaaaataattttcttattataaccgtgcaggacggcatatctccctgaaccaaaaaaccggataaggagtgccgtcctgaaccattactatttattctgtgatttttttcattgcctggtttgctgcgatgaggatgggatcataaacaggggctgcaggaggagcgtaaaccaagtctaactcatttatctcttccactgtcataccgcaagtaattgcagttgccaacacattaattcttccggcgatactttcgcttccgatgccctgggcgcccagaaggcggcctgtttttttatcaacgatcaggcagatgtgattatcgcggcccccaggatagtaggaagcgcggtctgccttcgtaatgctgaccgatatggcgtcatagccctctccggctgcctgctccttagacaggccggttgcggcgataaagagctcaaacacttttgtgaccatggaacccaatattcccttaaatgtatcatgtctgcctgccacgttaccgcctgcaatgcgcccctgcttgttggcggttgtgcccagggggacgtaagctggttttcctgtaatcctgttcttcatctgcacgcagtctccgcaggcccagatatccttgtgacttgtacgcatctcgtcatctacgataattccgccctttagccccagcgcaagtccggcttgctctgccagtgcgccggccggttttacaccagctgatacaaggattatatcggatggttcgatctctccaaaagcggttcggattccgctggcttttccgttttcagaaaggatttcggctatctgtgtgcctgtgcgtacgtttatgccgtgctttataagcgtatcctccagggcctgggaaaaggcgttgtctaaaaatggaaggagccttggaaactgctcataaacggatactgaaagcccggcgtttcttagctcctcggcggcctcaagtccgatagctccgccgccgatgatgcagacccgcccatgttctcttgcggcagctttcaggcggatgccgtcttccatgttcctcagataatataccccatccgagtgaattccgggaataggaggcaccactggtactgcgcctgtggcaatcaccagtttatcataagaatgtatgctgacctggtctgtatccagattttttacagagacctcctttttttccgggtcaatgagaagcacctcatggtgtatccaggcggatatattccgcctgttttttaatgattccgcattgattgccaccaagtcattgatatcatgaatgagtcctcctacaaaatagggaagaccgcaggctccatagctgacaaatccggatttttcaaagacttgaatctccatgtcaggtttttctttgcgggctctggatgccgcgctcaggccggcagcggtccctcctataacaatcagtttctctgccatgttgaacctccggtttttaattctttactccatatttgtcaatgacacccatttcacccatcaaattttcaagatcctttaatttggttccggcataatcctggtaaggttttctcagatgtcctcccggaaggccgagaatatttaaagccgctttaatcacaaccggattagagaacgtgtacagcgcctgaagaagaggaaaccatttaaaataattctctctgcattcctcaatgatgttcatatccgtccaggggcgggaatacaatgccgcttcctccggaataatgttaccgccgatattggctgttccggttccgcctacagccagggttggaagtacaatcgaatatttcgggaaatcgcagcacataatcttaactttgccctggcagaggcgctgtacctgaaccagctgctccacatttggaagggcttccttatccactacaaaattcggatgtgcgtcggacagctttttaattgtttccggcataatctgaacgccgagtctggaaggattgttatagataccgcagggtatgcttaccgagctcatacaggtatccatatgaataaaagcggctgtctggttaattaaaacatagggcggaaccgtaaaaatgaccccgtcagccccctcctgttcacaatacctggcaaaatctacgcttgcctgcgtggtcatggacgctgcgctgaaaaatacaggaattcttccgtttacaatcttaatcacttcatgtacaatggcttttttctcttccaatgtaagcagggttacctctcctgctgaaccaagaataaaaatttgtgaagttccatactttatttgacggtcaatcagggtttcaaagcccttaaaatcaattctgtcatcctctgtaaatggggtaggcattgctacccatgagccgtgtaattggaccattgcttatctccttttttattattcaaaatccacatcaaagaaatccaaagcaataccagcaagtgtcaggatacctgtggtgagagctttccggtcacagtaaaagtgggggctgtggagcccgccataaggaccgccttcgcttcgcgaaccaaacctaacgaaaaccccaggtgccttctccattacaaatgcaaaatcctcggcgcccatacttggatgagccagttcgattacattctcatgacctagaagtttgctgccgcagcgttttacccgatcgacccattggctgtcgctgaccagtggaggaggccccagtttgatgttcacctctgcatcaccgcgtccggcagcggctatacccttgcatatttccgggattctttttagtatatgctcccggacttttgggtccagggcacggatggtaccctttaatacaacggaatcaggtatgatgttaaatgcatttccgccctggatggagcagagggagacaacaccggattcgtctgccgcaagttcacgggaaaccagcatctgcagtgcctgtacgatctgggcagctaacaggatggggtcgataactgtgtcaggatgggccccatgaccgccctttccttttacggtaatggtgagttcgtctgaacttccaagaattgcgccatagcgtaccccgatttttccggcacataagtcaggtgttacatgcagggcagccacaccgtcaatggtatggaagtctattttggggctttcagcaaacagttttccgccttgcagcgtttcctctgacggctgaaaaaagaacagaatggatccggcaatctgattcctgtaatgctccagaactctcactgctcccaacaggatggatgtgtgtacatcatgtccgcaggcatgcattatgccgtctgtcttgctccgcagttcgtggctctcgtcttcttttatggggagggcgtccatgtctccgcgaagtgcgatgcagtgggcggtgcccggtttcgttccctttatttccaccagaagtccggtttcaccgatgtgctcgattctgtcaacatgagttttttcacgcagttctttttctatgagagcgcttgtattatattctttaaggcccagctcgggattttcgtggatttgctggcggactgcattaatttcaggttctagtgaagctactaattcatgtattgtcatgtgattctccttcttgctgccttcgtatcttcaatacttaaagtccggtccagcctatgctctgtaaaaacatgagtgtaaagaacgccagcgtaatctgaacaagaataagaggcattgccttctttaagtattttccataagaaatacctgcaaaaccaagacctcccatcaaggtaccgatggtaggaatgacacagtttgtaaatccgtctccaaactggaaggcctgtacagcaacctgtcttgtaatacccgttaaatctgcgattggaaccatgattggcataacagctgcagcctggccggaaccagaagaaatgaaaaagttaataagagcattggcaaggaacatgaagccggcgcctaagacagcacccatgtggctgattggctttgccagccaatatacgattgtatccagaatcatgccgttgctcatgaggacagtcaggcaatttgcaaagcctacgatgaaagcagcgcctaccgtacttgcgcagcctttaatgaaacggttgaaacccacgtttatatccttacagcttacacatccgatcaggaggcaaaccaccagaaatgttgcagaaattttgtccgcgccccatttaaacttcaatgcgccgattacaaccgcagccagacctgccaccatacacagcatagacagcacctgaacctttgttacaggggcatcgcctaactcgccgtcctgatagcccatgatatcatttgttttcaggccctgctcataattcaggcttttgcaggggtcttttttgatctggtgaagatagaagataacaaacgcataactcaatgtaaagtttacgatatggaaaattaccctggcactaaaaccggaaaacagcggtacctctgcgattgcctgcgccacgcccaatacgcccgcatttgcccagcccacattgaaaccagcgaactgtccgaagaaaatcatgaaaaatcccagggtcttatcaaatcccatggcctgtgacaggaaaattccaatgggaatcaaaacaagggttgcgtttccgaacacacctgtggcaccgcccatggacatgaaaaacataacacagaaaatagctatttcttctctgccctttacggcctttgccagtttcataaaaattgtgtcaattgcttttgtttctgtaatcatgtaaacagctgcgcctacaaacaaaatcatataaataaggctggactgatttttaaaacctgttaccagggcctgaaagatttcccatggcccctgaggattctgaccaatcacatgataagtgccggctacaacctttgttacattttcttctgtcacacgctcatagcttcccgcggggacaatccatgttaaaatggccgatacaattgctaacaaaaacaagattgtatatacgttcgggaaccatgatcttttattgccttctttcataccatttcctcctattgtcaactgatttttgaaattattaattctacccacctttctgtcaaataattatggaaataattctagcatacatttagtaatgttactgcttcctaagttacaatgaaaaaacatataaaatgcatctttttgtacattgatttaaaaacagttcacacaaaaaagactcatgaaaaagtacatgagtcttttgatgtataatttgatatatttttacatttactatacaaaatatttataaaagttcgacagatttactactgcatcaccttattatatgcagcagcattaatctgtgtattccggttcaaaatacgaataaaatcctcgttgcataattcctttatggttttgctgattgtgattctggagctgccgataattgcgctcaactcctgctgtgtgtaatgtaccttcagattataccacttgttttctaacagacaggacgtatcagctgtggaacagaataagcgttttaagcgatctttacaggaattaaaagccaggctctcaatttcatggcgcataattaacattttttttgaataactctcaagaatggcttcacggaaaaccttattagtatcaagcagtatctcataatcctgatagggaataatacggacacgggtttccacttctgcctgagaaaataatccggttgactcccgaagcgacagcggtgtttcgccgtaaaaccacccgtcagaaagcgtatacagtatcttctcggttccgtctgttccaatcatgtaatggcgtgttctgcctgtgatgatataatataccccttgaagtgtttggcctggtgtcagaaatatctttcttgcaggatatacacatgtttctccatgacattcaatgagccgttctaataccgcgtttcttttatttggcagagtaaaactagaattatccaactgcatctccattcactccaagtataataatggcatatccctatagaagctgcgattcgtgagtttataaaagaactaattgctgtaaattatagcacaagcactgttcacctgtaaagggggttctttttgggccggctcatcacgggccgccggcccatcatgcaaaattctgacagtgttttaaaacggacaggaaaatggagttgtataatatgcatatataattaggaaacaacacgaagatataatccattattgacaatacatgccatacgtggtaaggttaatattataaacttgaacaaaaaacatcatgagagtgagcagaatgaacagtaaaatacagcgtacatctcttcagtcagagataatccgatatatacagaattacatccaggaaaatggtttaaaacccggcgaccgccttccctcacaggaaaaactgatagagatgatgggggtcagcaggacgtccctcagggaagccatgaagacgctggaagccaggaatgtgctggaagctaagaacggaaagggtatctatgtgggaagccaggaggtcaatgaccttttgagactgattgattttgccaaggagaaggagcttctcctggacaccctggaggtacgcaagatattagagcgggagatactgcgcatggtgatccattccgcaacccgggaggagttagaagaactgggagccataacaagggtgctgatggcaaagttccgccggggagagcagcagacagcagaggataagaagttccactataccatttaccgtttgtcccataaccaggttatgtatcagctgattctgtccatcagcggtgtcatggataagttctgggaatttcctttgaacatggaggacccgtttttagaaagccttcctcttcatgaggagctttataatgcaatctgcgaaaagaatgtcaaaaaagcacaggcgatcaatgaaaaacttttggatgctgtgtacagagatattcggaatcaacgctgatactttataagtatatcccaacctatattatagcatatagcatataggattgtatattttttacaaatagccagggaggagagaggtaacaatatgacaaatcagaatgagtacctaaaaagtacaaagctaatcacggcccattatggagaagagtacgagcattattacaatgctatcgttcccccggtattcatgaattccctcaatgtatttgagacgcttgaggattattacgactttgaccggacagacaagcacaaatattgctatgggagggtgcagaatcctacggtgcgcatactggaggacaagatagcggctctggagcacggcgtgggagccctggcttttgcgtccggtatggcggctgccaccacggcagtccttacagcctgcaaggcaggcagccatgtggtatgccttcacaatgcatacgggcctttaaaggatttcctcagcaaatactgtacggagcacttggacattacccttacgtatgtgaccggtgacagggtggaggaatttgaggaggctgtgacagatgccacggacctgattgtgttggagagcccgtcctctgtgctgttttcccttcaggacatacgggccgtgtcccgcattgccaggaaacaccaggcgctggtatacatagacaatacgttctgtaccccgatctaccagcagcccctggatatgggggcggatatcgtgatgcacaccacatccaagtacattggcggacacagcgatatcatcggaggtatgctggcggtaaaggaccaggagctcatgaagaagctgacggccaacagggaacttttgggcggaatcgtgggccctatggaggcatggctcatgataaggggcctgcggaccatggaggtcaggctggcggcgcaccaggccgcagccatggaggtggcaaaattcctggaggcccatccaaaggtacaaagggtgaattaccccggactcccctctcatccccagtatgatctgatgaagcagcagcagactggcaacaccgggcttatgagctttgagattcacggaaccacagaggatgcaatcaaggtggcagagagccttaagatatttaagataggcgtatcatggggcgggtttgagagccttgtgttcctgcctcacgccagactggatgaggagacatgccgggtactgggggcaggtcagaatgttatccgcatccattgcggactggaaggtacagaggccttgatttcagatttggaatcagctcttgctaagatatagaagcatagaggaacagcaacaagaagcagtgaaaatcaagcagtaaaaaggaggagaacagatgaagaagaaacaattagcagcaatggcattggcggcagtgatgctgacaggatgcggaggcggcagtgctgctccagatgccacaaaagcagcagacagcggggcggccacggcggcagacacaggcaaaaaagaggcggacagccagaaggcagaatccggtgaagccgtcaccatcaccctggtggagtcccttaccagccctgagaggacagctgttctgagggagattgcggacaagtatcaggctgagcactcaaatattaccattgacattatttccccgccgctggagaatgcagatgccaagattacccagatgcttatgaacggcagcggcgcagacatcgtggaggtgcgtgattccactgtgacccagtatgccaccaatgaatggattgccgatcttcagaagtacattgacgcgtgggatgagaagggcaccctgactgaatcggctgacgaggtaattcattatctcaagggaggcgcttacctgattccttacggattctatcagagaggactgttctaccgcgcagactggtttgaggagaaagggcttgaccagccggagacatggcaggacatctatgatgcaggccttgccatcacagacccggctaacagcagattcggctactccttccgcggcggccccagcggctatcagtatgcggataccatttactggagctggattggtacggataaggtggcagatcccaatgcggcttacttcttaaaggatggggacggagctactatctttacactgcccgaggtaaaggaggcgctgcatttctacaaagacctgtttaagaacacctgtcccacggactccattgcgtggggattctcagagatggttcagggctttgtgggcggtaccacagccatgctgattcaggatccggaagtaatcgctacctgttccgcagacatgcaggatgaccagtgggcgctggttccattccccaagggaccgtccggccaggcagtattccccaacggcttcgcaggctggggtatgacatcctttacagaacatccggatgagaccgcggatttcctgctgtacttatctaattccgagaataacacatactttgccaagaactactccacaatcccgattcacaacaacgctgctgaaaaggatccttatttctctgagggacgttttgcaatgtatatggatatggcaaaggagccggatgtataccgtcatgctgcatatccgcagatgtacgaggcatttgcaacctacaagacagaggttgataccatgtaccagaaatacctgacggatgaaatcacggatgatgagctgctgcagtggttagatgagttctggacccaggcttacaaggatgagggccagaagtggtaaggccggattgaccagagaacgaatgaaacacaagcagtaagaaccggagggtgccgggagcgggggacctgctcccggcacttccggatacagagctgtgcgcgccgtgccggggaagccggcacacgcagccggcaaggaggggatggcatgaaacaaacgtcgaaattaaaaatgaggagagcccggtttatctttatcatggttcttcctgccatactgtttcccatgatatttacctactatccgatgataaaggggtccctgatggcattccagagctacaatctgatgaatgtcaagaatatcaagtgggtgggtctggaaaatttcagtaagctgtttgcccacaacaccagcaataccttctattccaccatgctcaacacggttaaatgggtgggaatctccctgtttgtccagtttacggtgggatttgccatggcattgcttctgaagaagaaatttaagggttccagcctttatcaggggctgattttctttccatgggctgtttcgggatttattatcggcatcatgtggcgctggatgttcaacggaacctcaggggttatcaatgacctgctcatgaggatacatttaatcagccagccggtgggatggctggccagcaagaacacggccctttactcctgtatcatagccaatatatggtacggaattccattttttactattatgattacggcagccttaagaggcgtgtcggaagacctgtatgaagcagcggatgtggacggcgccagcccgtaccagaagtttaccaacatcacggtgccctgtattcgttccgtgctgcttttgacggttctgctgcgggttatctggatcttcaatttcccggatttgatttactccatgacccagggcgggcctgcggggtcctccaacatcattacgtcctacatgatgcagctggtccagagtctggattacggcctggcgtcagcggtgggcgtgctgtgtatcctgttcctcattgtatttgcagccatttatctggttgccaccaagtatacggacgaggaggcatgatatcatgacaatgaaaactaagagaaggcttaaaagcctgttaaaatatttggtactggcatgtttccttgtgctgaccatgtttccctttgtgtggatgcttcttacatccttaaaagggtcccagggggaaatctatgcgtttccggtacggtatctgcccaatcccgcgtccgcggtcaactatgtggccatgctgtggaaggggaatttcggccggtatatgcttaactcctttttctcctcggcagtggcagccacctgcgcggtgtttattgccatactggccagttatgtcataagcaggttccatttccggtttaagaacgtacttctgctgtttttcctggtcacccagatgattcccatgtttatcatgctggcgcccttataccagcttctggcaaaggcgaagatgctcaacgacctgcgcagcctggccatgctctacacgaatatgatgattcccttctccgtggtgacattgtgcggcttttttgacagcgtgccaaaatccctggaggaggctgcctggatagacggatgcggctattttaaggcattgtttaaggtggtggtgccggttatcatgcccggtatagcggcaacatttatatttgcgtttatcaactcttggaatgaactttttatggctgtcatgtttatagatgtggataagttcaagaccataccggtgggacttaacggcctgattcttaaatatgatattaaatggggcgagatggcagcaggaaccatcatgtccctggtacctaccatgtgtctatttgcctttgcccagaaatatatgatagaagggcttacggcgggttcggttaaaggttaagcgtgctgtcctgcataggaaccggccggggccggcggacagatatcaaatttgtccgccggccccggcttttcccgtggtaacataaggacacagatgatttgggccgggataaggaggaagaagatgagcatattatttgaactggagcggatggagcgtctggcggaggatctggaccggcttcgcaggccggtgaggattccggtcagctgttataagcggatggaaggaaaggaaaaaggcagtccctggtgcagcaccctggattgggaggactgttccatagaagaaccatgggcgtgtctggacagccacaggtggtacaggacaacggttgagataccgccacatctggacggggcccatgtggaattcctgatcaccacgggaagggaaggacagtgggatgccaccaatccccagatgctgttttatctgaacggaaacattgtccagggagtagatgtaaaccacagggaaattttaataagttccggggccaaagcaggagagcggtatgaaattgccatactggcctacagcggcagcgtgccgggagacctgataatccgcacggagctggtccgggtggatgacgcggtggaaaaagcttactatgattttctggtgccggtacaggcagccaggcttcttaaaaaaccggatgaggaaaattacaggcggattctggtaaagctggggccggctgctgatgccctggatttgagggagccgtattcatcccggttctaccaatccatagaggagatggagagaatcgtggaaaaggaattttaccagaaggtgaatgcagcctcgcctgtggtaagcgcaatcggccatacccacattgacattgcgtggctgtggaccgtggaacagaccagggagaaggctgtgcggagcttttctacggtactggagctgatggaccggtacccggattacaaattcatgtccagccagcccattctgtaccagtttgtaaaggaacaggaaccagaactttatgagcgcatccgggagcgggtcagggaagggcgatgggagacagacggcgccatgtggctggagtcggactgcaacctgcccgcaggggaatcactggtgcgtcaaatcataaagggagagcagtttttccaggaggaattcggcatttccagcaggtgtctgtggctgccggatgtatttggctattccgccgccataccgcagatactgaaaaagtgcggaattccctatttcctgacaactaagattgcctggaaccagtttaaccagctgcccaacgataccttcatgtggaagggaatcgacggcagcagggtgtttgtattcatgcctactgcctgcgactttgataagactctggggttaaatgtgtcatttaccgacaccaggaacaccaccacatacacaggcattgtcaatcccaatatgacgctgggaaccttcaagcggttccagaacagggatctgacagaggacacgttaatgctctttggatttggcgacgggggaggcggacccacaaaggaaatgttagaggaggcaaagcgtctgcagtacgggcttccgggcattcctagactggtccaggaaaatgaacggaccttttttgaccggattcatcacgacattgggtccagaccggacatgccggtatgggatggggagctttactttgagtaccacaggggtacgctgacctctatgggaaaaaacaaacgctataaccggaaaagcgagcagatgtacgaacagctggagactctgggagtcatggcggagcttaagggtttggaatatcctgccggcgtcataaaaagggggtgggatatcatcctgttaaaccagttccatgacattattcccggaagcgccatcgggcctgtctatgaacagacggaccgggaatatgaggaaatacttaaatccggcgcagagacagcccttcatctggcagaaggcatgggaagcaggatctgcggtcaggataaggataccagccgggaggagccggaagaacaaaaaccggaagaacataagattattgttttcaatacacagggatatgagcgggaggacacggtaacagtgtccggtgtggcccggggggaggcggcatatgcctgcgactgcctgggatacagggctccggtccagtatgtgggggaggatacgcttatattccacgcaaaggggattccttcctgcggttatgctgtgtacagccttgtgggggcagaggatagtgtgaaccagggaacgtccgggtctgccaaagaacatcctgtgctcgccgcagaacaccccgggcctgacccggaaccatccggatttgacgcagaatgcccgcgcccatggcccggcttctttgaaaatgactggtacagggctgcgtttaatgataagatggagcttgtttccctggttgaaaaggagacaggctgccagctgttaaaagaggggcgtgtgggaaaccagctcctgacctttgaggaccgccccatgaactgggacaattgggatgtggatatgttttatcagagaaagccgtacaatgcagaccatgtgacagcgccggttttaaaggagtgggggccggtgcggacggtgatgtccatctctcaccggtttgcgggctcccttgtggagcaggatatcgtgttctaccccaatctgcccagaatcgactttgtgacccgggcagactggagagatcatcatgttctgctgagggtttatttcccggcccggattaacgccaccaaggccgcctatgagatacagttcggcaatgtggaacgggagaccaccagcaaccacagctgggatacggccaaatttgaggtatgtgcccataaatgggcggatctgtcggaaaacggcctgggactcagcctgcttaacgactgtaaatacggacacagcatcaaggacggggaaatggggctgaccctgattaaatcagggacctatcccaatgagaacgcggatataggcttccatgaatttacctattccatttatccccacaagggaaggtggcaggaagccagaaccgtggaaatggcctatgacctgaattcgcccctggtatccgccctggtgcccgccaaaggagcaggagggttctggagcatggtgtccgtggaccagccggactgttttgtggaaatgatgaaaaaggcggagaatgggaatggatatatcctgcgtatctatgaaaaccgcaatacaaggacgcctatgacggtaaaacttggatttgaaatttcccgggtggaggaatgtgatttgctggaaaggccactgaggcccattgagacagatggatacaggtttaaggatttcataaaaccctatgagattaagacataccgcatctgtcccgtccgtgcgtaaggtcccggataatcaggaatcggaatgtaagggaggattcacatggaagaacagagggcatggtggaaagaatgcgtggtgtatcagatttaccccagaagcttccaggacagcaacggtgacggcatcggcgacctgaacggtatcaggagccgcctggattaccttaaggatctgggaattgatgtaatatggctctccccggtgtatcagtcgccgggggatgacaatggttatgatatcagcgattataaggctgtcatggatgtgttcggcaccatggaggacttcgacaggcttctggcagagatacatgaaaaagggatgaagctggtaatggacctggttgtgaaccatacatcggatgaacacgcctggtttgtaaagagccgccgttctcctgataatccctacagggattactatatatggaaggctcctgtcagcggaggcccgcccaataactgggcatcccgcttccgcgggccggcctgggaatacgatgaagggaccggcatgtattaccttcatatttattccaggaagcagcctgacctgaactgggaaaatccccgggtacggcaggaaatatatgatatgatggcctggtggggagacaaggggattgacggtttcagaatggatgtgatatccatgctgtccaaggaccagcgctttccagacggggtgttgaaagagggaaatccctatggcgatggtctgccctattatgccaatggccccagaatacatgaattcttacaggagatgaaccgggaggtcctgtcccggtttgactggatgagcgtgggagagggcgtgggtgtgggaaccagggaggcagtgcagtatgcgggatatgagtcccatgagctgaacatgatgttccattttgaacatgtggaactgaatcccgggccatttggaaaatggaatgacaacccggtctgtctgagagagctgaaggaagtgctgaacaggtggcagacagaactggagggaaaggcctggaacagcctgttttgggagaatcacgattatcccagggcggtgtcccgctttggcaatgacagccccgtgttctgggaactgtccgccaaaatgctggcagtctgtctctatatgatgaaggggacgccctatatttaccagggacaggagttgggaatgaccaattttcagggcagcagcatagaggacttccaggatatagaaattcataatgtataccgtgagatggtgggcagcgggcgcatttcccatgaggagatgatacgctacatcaaccatatgggacgggacaatgcaaggacgcccatgcagtggaatgatacggcccaggcaggattcacagaggggacgccctggcttggggtaaatcccaattatacctggctcaatgcaagggagcaggccggacgcggtgattccgtcctgtccttctataagcagctgataaagttaaggcataccatggacatcctggtgtatgggacttaccggctgctgctggaggaaagcgggtccgtttatgcatatgaaagaacactgggggatgagcgcctgacggtactgtgcaattttacggaccagacacagagttgcggtctttcctgccgggacctgggaacagataacgtacttatcggcaattacccggaccagagcggcacgttccggggaaacggcccggccctgcatgaagaggaggatatctgcctcagaccctatgaagccattgtgcttacgcaataattgctggaggattctatatgggcattatatacgaagaaaaatcaaggcagttccatctgtacaacgataaaatcagttatatcatgacatgccttcccaacagtcagatggggcagctctactatgggaaacggctgcggcacagggagagcttcggccatctgctggagtttgcgcacagggatatggcgccctgtgtctatgaggatgacaccacattttcactggagcatatcagacaggaatatccggcctttggaaccggggatatgcggtatccggcttatggaatcagaagggaaaatggaagcagggtcagctgttttgtatacaaaagccacaccatccaagggggaaaaccggaattgccgggcctgcctgccgtttatgtggagcaggatgaggaggcgcagacactggagctgtatctggaggatcctgtggcaggtatggaactggtgcttctctatacaatctatgaaaacatgcctgtgcttacccgcagcgcccggtttatctgccgcggtccggagccggtctgcctggagcgggccatgagcctgagtctggacctgccggatccgcgttaccagatggttgatttgaccggggcctggtgcagggaacgctatgtggactgccatggacttcaccggggagtccagagcatacacagcatgaggggacacagcagccaccagttcaatccgttcatctgcctgaaacggcctgatgccggggaggacagcggtgaggtaataggcatcagccttgtatacagcggtaatttcctggcccaggcagaggtggataccatggatacggtccgggtgaccatgggaatccatccggagggatttgactggcccctttgtccgggggaggaattccagacgcctgaggcagtgatggtatattcaggggacggcttaaacggcatgagtcaggcgttccaccagctctacaggaccaggcttgccagggggtattggagggacagggaaagacccatcctgattaataactgggaagccacatacatggattttgacgaggaaaagattctctccattgcagacaaggcaagggagttgggcatagagctgttcgtgctggatgacgggtggtttggaaagcgggacgatgacaccacttccctgggggactggtatcccaatctgcataagctgcccgatgggataacagggctggcaggtaaaatcagggacatgggaatgaaattcggcctgtggttcgagcctgagatggtcagcagggacagctgtctttaccgcgcccacccggattggatgttagggagtacggaccggccggtgtgtacggggagacaccagtatgtgctggatttttcaaaggaccaggtggtggaatacataggggacagaatggaggagatactgggggacggcggtgtgtcttatgtgaagtgggatatgaaccgtagtatttccgacctgttttcagcgggccgggatgcgcggtaccagggaaccgtgtaccacaggcagatactgggagtctataaactgtatgagcggctcaccagggatttcccccatgttctgtttgaatcctgcgccagcggcggcgccaggtttgacccgggcatcctgtattacgctccccagggctgggtttccgatgacacagacggggtggagcgcgtgaaaatccagtacggaaccagcctggtatatccggtcagctccatgggaagccatgtttccgccatacccaaccaccagacccagaggaatgttcccctggcttccagggcagcggcggccttttttggtacctttgggtatgaactggatctgaacctgcttacagaggaggagcagtaccaggtaaaggaacagatacggttcatgaaggaacacaggaaactgattcagcagggaaggttctaccggcttataagtccctttgagggaaatgaggctgcctggattgtggtatcggaagacgaaaacaaggccattgcagcttatttccggttcctgcagcctgtgaataccggttttaagcggctggtgctaaagggactgaatccggggaccatgtaccgggtcagcggaatggactatacctcgtacggggatgaactaatgagtgcagggctgattctttcggatggggccagcggcgtacggaccagtccggtgccccagggagattatctgtcccggttatttttggtggaggcacagccttgacaaaaacctccgggcaggttatacttaacaggcagttttcagcagatatccatgcaggcatttgctgatacatctgcgtatgtacggcctaatatgtcataaagtttccacgcagccggggagatagcggtgccctgtacctgcaatccgctccagcaggggtgataccttgcctcgggctgtttgctgcgaagctgccttgtgtaagtggcgttgacgtctgggtcttacgcaacgggaatccgtgaaccgtgtcagggcaggaatgcagcagcactaagcggaacctcccgtgtgccgtgaggcagcctggattgagttaactgcatgagtaacgttcgtggcagcagcacaaagcaaggtgcgtggaatttaaaaatgggatataaatctgaggatacgtcactgtatcaccggatttatgtcccatttgtatttctgcacggcgcgtttccccggagccggccggctgcccggattctgcggctggccggttggcctgcatgaggctgcccggttggccgaatttatacttgccccgataacacctttgcgttataattacaaaatgggtataatagaaccattcccaggaaacataacagaaagtgaagaaactctataaggaggaagtgcaatatgagaaggattgggatgctgaccagcggcggagactgccaggcactgaatgccactatgagaggtgtggcaaagtccttatataacatgtttgatgacgtggaaataattggatttgaagacggatataaaggacttatgtatgcagactatcagatcatgaaatcatcagatttctcagggattctcacccagggcggtaccattctcggaacttctcgccagcctttcaagctcatgcgcactcctgatgagaatggactggataaggtggaggccatgaagcacacctacaaaaagctgaagctcagctgccttgtcgtgctgggcgggaacggcagccagaaaacagccaacatgctaagcgaagagggacttaacgtggtatcccttcccaagaccattgacaatgacctgtggggaacggatatgacatttgggttccagagcgcggtggatgttgccactaatgccattgactgtatccataccacggctgcgtcccacgggcgggtgttcatcgtggaggtcatgggacataaggtgggctggctgaccctgtatgcaggtcttgcaggcggggcggacattatacttcttccggagataccatatgatatcaatattgtgtgcgatgccctgaccaagcggtccaaggcaggcaagcgcttctccatcctggcagtggccgaaggcgccatttccagggaagatgccaagatgagcaagaaggaactgaaggaaaagaagaaaagcggagtggtatatccgtctgtggcctatgaaatcggggccaagatacaggaagtcatcggcagcgaggttagggttacggttcccggccatatgcagcgaggcggtgagccatgctcctatgaccgcgtgctggccaccaggctgggcgctgcggcagccaggctgattgcccaggagcagtatggctacatggtggcggtgaaaaacaacgacatcacccaggtgcctctctccgaggttgcaggaagacttaagacggtggacccggagtgttccatgattaaggaagccaagatggtgggcatcagctttggcgatgaataacagcatgataatcaaaataaaggttattttagaaataaatttatataaacaagatagaataacaggagttgcctaatatgtcatatacggcgttataccgcaaatggcgtccggtttcctttgaggatgtaaaaggccaggacccgattgtgcagacactgaaaaaccaaataacgtcggagcgaatcggccatgcttacctgttctgcggtaccaggggaacaggtaagaccagtatagccaagatatttgccagggcagtgaactgcgaacatccggtggacgggagtccctgcaatgagtgtcccacctgcaggtccattcagtcgggttcctccatgaatgtggtggaaatagatgccgcgtccaacaacggtgtggagaacatacgtgatataagggaacaggtgcagtatcctcccacagagggacgctacagggtctatattattgacgaggtccatatgctttccataggcgcctttaacgctctgttaaaaacactggaggaacctccctcctatgtgattttcatactggccaccaccgaagtgcataagattcccattacgattctgtcccgctgccagcgctatgattttaaacgcatatccttagagaccatagcaaaccgcctgagggagctgactcaggcagagcagatacaggtggaggacaaggcgcttctctatgtggcaaaggcggccgacggttccctcagggatgccttaagccttttggaccagtgtgtggcttttcattacgggaaggtgctgacctatgacaatgccctggaggtgttgggggcagtggattccggtgtgttcagccagatgttcggcgctattgtggagggcaggacaaaagactgcatatgcagcctggaggagattgtgattcagggccgtgaactgggccagtttgtcaccgattttatatggtatatgagaaaccttcttttaatccagagcgcggacgacgcagagggtctggtggatatgtcggaggagaatttaaagcagctgagaagcgatgcgggcaagacagacggaaccacgctgatgcggtatatccgtatcttttccgaattgtccaaccagctgcgctatgccagccagaagcgggtgctggtggaagtggcgcttatcaagctgacgcgtccttccatggagccaaacctggatgccatcctgcagcggttgggagatctggaagcccagatggaggatttggaggcagggcgcatggccatccccatggcagctgtttatcaggaggcaggcagcgcgcctgccggacaggcgccccggaccggagccggaccgggggcggatggggcaacagtaccccaggcagctgcgccgtatgctccgggacttcaggcagatcccggggctgcacccgaaaaggtggctcttccccaggcccagctggaagacctgaagctggtgagaaacgaatgggccaagatagtccgcagcatgggaggcggcgccaggtcgtatctgcgggacactgtggtggagcctgggggagaaggctgcctgaccatcgtgtttatggatcccatgaactacgatatgggtaagcggcccactgtgataggggaactggagcgctatgtggaagctaatttcggcaggtccatttactttaagacaaggttggccggccgtggggagcgccttaatacgatttatgtgacccaggaagaattggaagaaaagattcatatggatattacatatgaagatgaataatataaagatgaataagtggaaataataggaggataatacaccatggcaaaacgtggcggatttccaggcggaatgcctggcaacatgaataatcttatgaagcaggcgcagcgtatgcagcgccagatggaggagaccaccaaggagcttgaaaataaagaatacacggctgcttccggcggcggtgcggtcagtgtgaccgtgtccggcaaaaaagaagtggtatctgttaagctgtctcccgacgtggtggacccggacgatatcgagatgttagaggacctgattgtggcagccaccaatgaggcattccgccagatggaggctgagagcagcgaggccatgtccaagctgacaggcggcttaggcggagcactgggcggaggttttcccttctaatggattattacagcagtcagattaccaagttaatagaggaactgtccaagctccccggagttggggccaagtcggcccagcgcctggcatttcacattatcaacatgccgaaggagcaggtggaggagctggcgggagccatgacaggcgccaggaataacgtgcgctattgtaaggaatgcttcaccttgacggacaaggaattgtgccctatctgcagcagtgacaggcggaatcataagaccattatggtggtggagaataccagggatttggctgcttatgagaaaactggcaaatacgatggggtttatcatgtgctgcatggcgccatttctcctatgctggggattggcccgggggatataaagctgaaggaattgatgcagaggctccagtcggatatagaggaagtcatcattgcgaccaattccagcctggaaggcgagaccacagctatgtacataagcaagctgataaagcctacagggattaaagtgaccagaattgccagcggagtacccgttggcggagatttggaatacatagacgaagtaacacttcttcgggcattggaaggcaggacggaactttagacagcagatttccataccgggaactagcgatagggagatgcaaaagatggataaatacgagtttaacataaaagttgagcagattaagaagatggtaagccgcggggactatgaaacggccatgaagatagccgataccatagactggcgcagagtgaggaatgtaaacattctgtccatggtggcaaccatctatgagaagaacgaagagtaccaggaggccaaggatattctgctgctggcatttgagcgggcgcccataggaaagcgcctgctgttcaagctggcggagctggctatcaaggagggcagtttccaggaggcagaggattactacagggagttttgtgatctggcgccggatgatcccagacagtatatcctgcgctacctgattctgggagctaagggagcgcccgcggagcagttgattcataccctggaacagtactgcaacattgaactggatgaaaaatggatctatgagctggcagagctgtatgcggaggctggtatgggagaactctgcatcatgacctgcgataagattatgcttatgttcggccttgggaaatatgtggagaaggccatggagcttaagatacagtttgcgcctctgacaaagtaccagatggatctggtggaaaacagggataagtatgaggcccgtctcaaggcagtggagcaggagtaccgcgccggaaaaaggcctgcggattatgaacccgtgcccgagaagaaaacggaagtctctccccagtcctacatggcccgccaggaggctgcttttgcagcggagcccgaagcggagtacccggaggacggatattcggaaagtggatacgcagaaggcgggtatcaggaggacggatacgcagaagacggatacgcggaagacggatacccaaatgatgggtatgcagaggacggatatccggaaagcgggtatgcggaagacggatatacggaggagagatacacagaacgcgggtatcggaatgaccggtatgcccagaatgaatatcagaatgacagatatacagaaacaggatacccggaggacgattattcagagcatgattatcagaaaagcggatatcaggcagaggcatatcaggaagattcctatacggatgaagatggttctgaggaggtatatgcacggcagggccgttacggaaatgaatatccggaccagaatgtgcaggaagatacgcaggacggcgccgaggccgggtatccggaggaacaccacaggattgctgttggggcagaggaaccatatgaggatgagggcgcacacacccgggttaccatagagtctgaggattcggatgaaggagaggaaccgctaaaggagccacagtcccagtggatgccggataagccccggattctgtcagatgaagccgtgcgggcgagaatgcatgaggcggaggttcaggcaaatctggcaaaggagatgtccaggatatcagacggacgtcacaggccggagacaacatctgcccagacacgtgtattgaccgatataaaggatttggggagagagtcatctgtccaggaatcccatcatttcatgatagaagccgagtattccagttcaggtctggaccaggccattgaacttcttaagaagattcataaggagacaggggctaagaaccaggccgccaagataacaggggaaaagcttaacagcaaaggtgtatttgccattgcggacaagttaacaggcaaggacctgattattgaacaggcgggcgccatggaggaatccaccctccaggagctgaaccagctgatggccagggatgagaccggtatgaatgtagtccttatagacgtggcgggtaacctggcccgtatccataaggtatatccgggattggccaaacggtttgaatatgtagggaagatggggccggaagaggttgcttatgtggcgcccgaaggagatgaccgccctgtacgtcctgtgcagcttcggaagacggaagaggcggctgcgcccaggacagctctgagacggacagaagaaccggctgcgggcaaggttcagccggtagcggaaccagctgccatcaggagccttccaaaaccagagacagagaagaagccggccgcagaacgtaaagcaggaacagaacagaaaccaaagccggagcgcaggaaaatggaagagagccgcccggagccggctgcccccagggaagaacataaagaagtctcccttaaggcggcggaaaccccgccggttctgcctcagccggaagaaccggattatgatgaccagcaggagatggatattgatgaatttgcccagtatgcatgccaatatgccagcgatattgactgcagcatatcaggaaagagcatgctggccctctatgagcgcattgaaattatggaggaagacggcgtaccccttacaaaggtaaatgctgaggacctgatagaggaagctgctgataaagcggagaatccatccttcataaagcggataacaggaatattctcgtccaagtatgacagggacggtcttctgatattgaaagaggagcattttatatgatgaccataggtttgattgcactggatcttgacggcaccctgctggacagccagaaaaacctgtcagagcgcaaccgcagggcactggagcgttgcgcccgtatgggcatacagattgtaccgaccacaggcagggcagtggatggtatcacgcaggaagtacggtctctgccgggagtcaactatgccatatccaccaacggcggaacagtagcggaccttgttaagggaaccagtctgaagcggtgtacactatccaatgcaaaggcattggaagtcatggacatcgttaaaaggtacagggcgatgtatgatccgtatatagacggaagagggatttcccagcctgagttcatcggacatatggaagacttcggcctgagtcctgtgattcagaagatggtgctctctaccagggatgttgttcccaatatcctgaattacgtaacagaatgtaagaaggatgtggagaaagtcaacgtatatctggctgatgtgaatgacatagttccgctgcgaaaagagctatcagctgtagaaggcattgtcatcagttcatccctgtataataatctggaaatcaatgctctgggagccacaaagggtattgcgcttatgtggctggcagattatcttgggattgcccctgaggccaccatggcatttggcgatggggaaaatgatctctccatgctggaagcagccggagtgggcattgccatgggaaatggactggacatagctaaaaacgctgcagatcagattacgctgacaaatgatgaggatggagttgcggacgccatagaacgcctgatattcaactaaaagaaagactgaaattatatggacatgatattagaacattggctgtctgccggtgcaggagtttttctcattggtatggtgctgtatggacattacaggggagcgctgaagcagtgcgtatccctgggagcgctgatacttaccattgtgttggtgaagattgccactccgtatatgacggattttatcaaggataatccgtccatacgccagagcgcggcagaggccatactggatgcagctggctgggaggaaccatccgcggaaaacacggagcttccggcagcgcagcgcattgccattgagaacctgaatcttccccaatccgttaaggaaacgctgcttgaaaacaataacagcgagttttatcatatgctgggagtggaccagtttgctgaatatgtcagcacatatttggccgacattctcatcaatgcagttagttccatcatcctgtttgcagtggtctatattctgattcatctggtggtgcggtggctggatcttatagcgcggctgcctatattgtatggattgaatcatatagcaggtgcagtactgggattaatccagggacttctgtttctttggattggctgttttttggtgggaatcttttccgccacacctttgggaatgacattggaggaacagatcaacgcaagtacctggctgcggtttttatatcagtacaatctgattaacattgtactgggcggtattatccggggtattctatagaagaaaaaatataattgttcctttaatatatataattaaaacaaatcgctgggaggggatggaaacatctgtaagcagcgatttttttattaaccacaaaatatagaaatatacagaaaaaataagcacatttagtggtgcgaaaataaagttgaaaattgtataaaaaaatggaacaaattcccttgacaagttgataaagtagtgatatattaaaggtccaccgcgaaaaacggtaggacaactcgaaaaaatgagttaaaaaagttgttgacaaacagtaacagatatggtaatatataaaagttgctgctaagacagacaacaaaaaagaaataaaaaaagttgttgacaaacagttgcaaatgtgataaactatcaaagttgctgctgaggcagccaacaacaaagaaccttgataattgaagattagacagtatgtaaaaccctgaaaattctaaaaacaaaaggtctggtttaggcctttggatttgagaaaattcagaacaaaaccaagtaatgaaggttaaagataactagccaagctaagtagtctgaaacctggaatcaacttttaaacatgagagtttgatcctggctcaggatgaacgctggcggcgtgcctaacacatgcaagtcgaacgaagcaattaaaatgaagttttcggatggatttttaattgactgagtggcggacgggtgagtaacgcgtggataacctgcctcacactgggggataacagttagaaatgactgctaataccgcataagcgcacagtaccgcatggtacagtgtgaaaaactccggtggtgtgagatggatccgcgtctgattagccagttggcggggtaacggcccaccaaagcgacgatcagtagccgacctgagagggtgaccggccacattgggactgagacacggcccaaactcctacgggaggcagcagtggggaatattgcacaatgggcgaaagcctgatgcagcgacgccgcgtgagtgaagaagtatttcggtatgtaaagctctatcagcagggaagaaaatgacggtacctgactaagaagccccggctaactacgtgccagcagccgcggtaatacgtagggggcaagcgttatccggatttactgggtgtaaagggagcgtagacggcgaagcaagtctgaagtgaaaacccagggctcaaccctgggactgctttggaaactgttttgctagagtgtcggagaggtaagtggaattcctagtgtagcggtgaaatgcgtagatattaggaggaacaccagtggcgaaggcggcttactggacgataactgacgttgaggctcgaaagcgtggggagcaaacaggattagataccctggtagtccacgccgtaaacgatgaatgctaggtgttggggggcaaagcccttcggtgccgtcgcaaacgcagtaagcattccacctggggagtacgttcgcaagaatgaaactcaaaggaattgacggggacccgcacaagcggtggagcatgtggtttaattcgaagcaacgcgaagaaccttaccaagtcttgacatcctcttgaccggcgtgtaacggcgccttcccttcggggcaagagagacaggtggtgcatggttgtcgtcagctcgtgtcgtgagatgttgggttaagtcccgcaacgagcgcaacccttatccttagtagccagcaggtagagctgggcactctagggagactgccagggataacctggaggaaggtggggatgacgtcaaatcatcatgccccttatgatttgggctacacacgtgctacaatggcgtaaacaaagggaagcaagacagtgatgtggagcaaatcccaaaaataacgtcccagttcggactgtagtctgcaacccgactacacgaagctggaatcgctagtaatcgcgaatcagaatgtcgcggtgaatacgttcccgggtcttgtacacaccgcccgtcacaccatgggagtcagcaacgcccgaagtcagtgacccaactcgcaagagagggagctgccgaaggcggggcaggtaactggggtgaagtcgtaacaaggtagccgtatcggaaggtgcggctggatcacctcctttctaaggaagaagaagtaagggttttatatactgtttagtgttcaattaagaggacacaaagaatttccggtggcgatgcgcttaggggaaacacccgtacccatcccgaacacgatggttaagacctaagcggccgatggtactatgctggagacggcatgggagagcaggtggctgccggattttaaccgggcttatagctcagccggttagagcgcacgcctgataagcgtgaggtcggtggttcgagtccacttaagcccactagtctgtatcagacagacatcataatttaatagggattgcctctgaaagaagagggaagacccacatcctatgggggtgtagctcagttgggagagcatctgccttgcaagcagggggtcaagagttcgaatctctccatctccatttgctgaagtgaccaaagggaagaggcttatgctgaaaacctctgaggaaacggaagcatatcatacgtaccttgaaaaccgcatattgaataaaaatgaattgtatattctaaatcagaatatcaagacatccgaggccatacaagagattgtatggaaaaaacaaacttgtaaatgcgaaagcgtttatgaaaacctagaaccaaagcgtccaacgctatggacgtttagaggacccgcagcaacccgcggcgggaaatcatttggttaagctataaagagcgcagggtggatgccttggcactaagagccgatgaaagacgtgataagctgcgaaaagcttcggggaggagcaaatatcctttgatccggagatatctgaatggggaaacccggctgagcaaacctcagtcactgcatggtgaatccatagccatgcagagggaacccggtgaactgaaacatctaagtagccggaggaagagaaagaaacatcgattcccaaagtagcggcgagcgaaatgggaagagcccaaaccagcgtgcgtgcatgctggggttaaggactgcaaacgtgaaccgatttgttagtggaactgtctgggaagtcaggccagagagggtgaaagccccgtacacgaaaacaataggaagcagcaggatccagagtaccacgagacacgagaaaccttgtgggaagtcggagggaccaccctccaaggctaaatactccttagtgaccgatagcgcatagtactgtgaaggaaaggtgaaaaggaccccgggaggggagtgaaaaagaacctgaaaccctgtgtttacaagctgtggaagcacgttaaggtgcgaccgcgtactttttgtagaacggtccggcgagttgccggtactggcaaggttaagagcttaaggctcggagccgaagggaaaccaagtctcaaatgggcgtcaagtcagtacaggcagacccgaaaccgggtgacctatccatgtccaggttgaagcggaagtaaaattccgtggaggaccggatccacatccgttgaaaagggtgggaatgaggtgtggataggggagaaattccaatcgaacccggagatagctggttctcctcgaaatagctttagggctagcctcatattagtttagcggaggtagagcactgaattcctaagggggcgtcaaagcttaccaagggatatcaaactccgaatgccgcataaatgatgtatgggagtcagactgcacgagataagttgggtagtcaaaagggaaagagcccagacctacagctaaggtcccaaagtgtgtgttaagtggaaaaggatgtgggatttcaaagacaactaggatgttggctcagaagcagccacacattcaaagagtgcgtaatagctcactagtcgagaggtcctgcgccgaaaatgtccggggctgaaacacaacaccgaagcttaggaatgtatgtaagtacattggtagaggagcattcttagtgcggagaagcggtaccgataaggagccgtggagcgctaagaagagagaatgccggaatgagtagcgagatggaggtgggaatcctccaggccgaatatccaaggtttccagagtaaagctgatctgctctgggtaagtcggggcctaaggcgaggctgagaggcgtagtcgatggacaacaggttgaaattcctgtaccatgtatcatcagaactgtggggacacagaaggacaacacatcccgggaatgggaataccggggcaagcgaggtaggagtacggttggcaaatccgccgtgcaatccgaagacgtgacgcgcagcgaactaaagtagcgaagtgtgtgattccggctgtcaagaaaagccgctattgtgtgatacatgcccgtaccgtaaaccgacacaggtagatgaggagagaatcctaaggccggcgggagaagcattgttaaggaactcggcaaaatgaccccgtaacttcgggagaaggggtgccacagagatgtggccgcagagaataggctcaagcaactgtttagcaaaaacacaggtctatgcaaaaccgtaaggtgaggtatatgggctgacgcctgcccggtgctggaaggttaagaggagaggttagcgcaagcgaagctttgaatttaagccccagtaaacggcggccgtaactataacggtcctaaggtagcgaaattccttgtcgggtaagttccgacccgcacgaaaggcgtaatgatttgagcgctgtctcaacaatgcacccggtgaaattgaaataccagtgaagatgctggttacctgcgccaggacggaaagaccccatggagctttactccagtttgatactgggattcggtattgcatgtacaggataggtgggaggctttgaaacatggacgccagtctgtgtggagccaatgttgggataccacccttgcgatattgggtttctaacctgcgcccgtgacccgggcgggggacaatgtcaggcggggagtttgactggggcggtcgcctccgaaagggtatcggaggcgctcaaaggttccctcaggatggttggaaaccatccaaagagtgcaaaggcataagggagcttgactgcgacaccgacgggtggagcaggtacgaaagtaggacttagtgatccggtggtatgaaagtgggattgccatcgctcaacggataaaagctaccctggggataacaggcttatcactcccaagagttcacatcgacggagtggtttggcacctcgatgtcggctcatcgcatcctggggctgtagcaggtcccaagggttgggctgttcgcccattaaagcggtacgcgagctgggttcagaacgtcgtgagacagttcggtccctatccggcgcgggcgtaggatatctgagaggagctgtccttagtacgagaggaccgggatggacagaccgctggtgtacctgttggcctaccaaggccatggcagggtagccaagtctggacgggataaacgctgaaggcatctaagcgtgaagcccccctcaagatgagatatcccatcgcgaaagcgagtaagaccccttgaagacgacgaggtagataggttagaggtggaagtgcagtaatgtacggagctgactaatactaatcggtcgagggcttatccagaaggttaagggaaaaaggtttgtaaacaatcggaattcaatatgtggttttgaaggtatgtattacctgcataattaatgcaggtttttcatataatatcttcaaaaggtacttgatgaattttttattatcatgtataataggaaatcggagagcatcagcctattcctcgatagctcagtcggtagagcacgcggctgttaaccgcgctgtcgtaggttcaagtcctactcggggagttttttaatttatatatgcaaggccccatggtcaagcggttaagacatcgccctttcacggcggtaacaggggtccgaatccccttggggtcatttataagttaatatggcgacgtagccaagcggtaaggcacgggtctgcaacacccttatcaccggtccgattccggtcgtcgcctctcagaaagaatcacgtatatgtggttctttttattttagttaaaaacaaaaagcagggagaggcaataccatgaggacaaggaagatgaaaaggtggctgtcaattatactggcaggcctggcggcagtgattcttattgcagcggcaggaggggcattcctgttccggcatgagttaaagacgttgcactcgcttaaaaaggtggatgacaatgtgctgtataccatgaagtatgatggggattatggatttgatgaatttctggagacaggggccagcagtgacagtgagctggtggaatttgtgacgaatcgtctgttaaagggaattccgctggaattttctattcctgacttaggctgctctaccttcagcgcacagacagaggacggggcccgcatattcggccggaattttgatctgacgtattcgccggccatgttcgtattaacagagccagccaacggttatcgttccatgtcaacagtcaacttggcatttctggggtttggagaggacaagctgccggatacattgaaacgcaaaattataacgctggcagcgccctatgcccctttggacggtgtgaatgaaaaggggctggcggtggctgttctgcgcattggcgatgagcctacaaaccaggatacgggaaagacagatattaccaccaccacggctatacgtcttatgctggataaggccgccaatgtggatgaggccctggaactactggcacaatacgacatgcactcgtcggccgggagctgctaccacttccagctggcagatgcactgggcaacagtgcggtggcagagtatattgataatgaatttgaagttatcggaaaaaaaggagattaccaggctgcaacgaatttcctgctgtcagagaagaaatttaattttggaaatggtcaggaccgttatcagatattggaacaggcattgggagaatgtgccggcattgttagggatgagcaggaggctatggacctgttggaagctgcgtctaaggactggcatgtgtctgagacaacaggacgtcttaatgccacacagtggtccattgtatataattgcacggaccttacagccagtgtggttaccgggaggcagtatgacaagcctgcccatgaattcagtcttaaatagcaatctattcttttgcggagagcagtctcttgactgtctttccgctgttgttttttggaaggttttcatggaatataatatctctgggaatttcccaggattccagataatcattcagcctcctttttataatacggcgcagggaaactgcgtcctggccggaaggattgggcactgtgaggacaacatgggcctgcagggcattgttttgaagaataacagcggcttcctgtatctgagtcagggagttcagggcattttctatttttacagctgagacttttcttccgtgaatattatatacattgtctttacggccattaaaatacagataacctttatggtctgtatagcccatatcgccaacgctgtaaggtcccgtgattcctatggcggaatagggagtatcaacatagatttcgccgttacggagggttacatccacgccgggaaagggtttgccgatacaggcaggattatcattcatttcctggtctgtcagccaggtgacatagctcagttcactggccccataatagaggaaacagcagctgttgggataggctgcttttaaaaggactatatccccgtggccaaggctctgggaaccggccaggatggtcttgatatcagggctgggatgggagatatattttgccaggagccggagcttggaggggatgagatagagggcgtccgcatggtgaagctctatttccctgcaccagacaaaaggatttacatgggaagcagtgatgatggatgcccctagtgacagaagagacagatacagattcagattgccggtgaatgccaggctgccatgagcaaagagccgtgtttgggcagtcattccaaagattgcattttgggtaggaaagaaggaggcccagctatccagggtacggaaccatagtttgggctgacccgttgaaccgctggtaagcactcccatacaggctccggcagggagtccctctgttataagggattcaggaacatatttcatgtccgcaggcacaatgacaggaatatgggatgtaccgcttaacgccagaaactgtaccagctggccgtgcacagacgctgccctgatccatgctgcggaaggcacagacggttccggggtcagggaacggatacggcaggcttccctggtaagcatgccgtatgtataaaaccggccgttttcgaccagggctgtcctgtggggaggaattgactgaatcagagagagataatccgtagaatgtttcatgggaggactccttttgacgtatgacatttggggagatgatactgattaccgttccaaaagaatggcgcttccgattccgcctgcggcagccgcgcagcagatgccccggcagctttttgacagctccatggatctcataagatggagaaggataatagcgccggaagccccatagggatgtccataggccagggcgccgcccaacggattgtaacgggatgccttatccggatacgcccggttgatgagaacatcaatggcagcaaacgcctcgttgcactcaatggctcctatgtcatccattgagagtccgctgcgttctaaaagccccctgacagcaggaagcacggaggcagggctcataagagggtcagctccaaccgtacaggcattagaaaagcggaaacaggaggagagtttgtgctttttcagatactgttctgagcagagaagaaggaatgcagccccgtcattcatggtacaggcattagcagcgttgagataccggccatccttcaggacgcagggcagccggtccagcagacgctgattcaggcgggggcggattccctcgtcatgggcaaggccatatacagggacaataatgccgtcaagaaggccttcccgggctgttctgtacgcccgcctgtggctttccagcacccaggcatccatttcttctggggttatatgataatggcatatagtcttttccgcaccctgcagcatcacgtcctcacgatgcgggccgggaataaatttggcagtgctgtatgtcagggaaagctccgtcctgtgggcattgcaaatgccggcaggattaccggaaagagtatcatcatgggcggcagcgtatggatggttagggttatagcagcgcatgggctgggtggaactgctttcaaaacctccggcaattaccagatcagccagaccgctctgtatcctggcggcggctgttatgacggcctccagggaggaagcgcactgaaggtccactgtaaaggaaggaatggattctgaaagtcctgcttccagcgccataaggcgggtaatgttgcctcctcctcccacacagttgccgcagattatcatatcaatctttgacggctgataccggttggtcagttcctttaacacagccgctcccagatgctcggcggggacatgccggtatgcgctgtttctgacgccgatatagctgcggagtccgcccagtatgaataccttgtccatataggtccccctaacgtgcccgctgggcgtttgacagacttatctgcaccggctttgcaatcagggcggcagcaaagcatttaaaaatgtcaaggggaataaacgggattacggcggctgtaaaggtagctgcccagtccattccggttatgaatttcatatacgcacttcccaccagatagattaccggcattcccaccagaatggtcaccaggcaataccgcttaaagctgtaatatgttccctttaaccatgacatgaggatgacagctggaatccatgacatgatatagcctcctgttgggccaaacagttttccgggaccgcccatggcgccggagaatacaggcagaccagtcagtccaagaagaatatacacgaccatggtaaatgctgcctgcctgggagtgagaagcagtgcaataaggttgacaaccagggtctgggctgtaaggctggccggtgtgaatggaagggggatgacaatataagcggaaacgcatatcaatgcagtcagcagtgccatttttgtgagttccatggtgttgaatttctggttcatgattacctccgtttttgagtttggtctgatgtgtgaatggtcatggtaaaacaggtagcgctgcccatggttcctgttactatattgtttttttgttccagacggacagaaccgcctgtatggacaggacgcaggaaccgtatggacagggtttctgcaggtctgtgggagccgtacatttcctccagccggctgagaatccacaggccgggaatgactgcatttggcccatggtgaattgggttggaatccccggaatcagccaggaagcgatcaagacatttctgggggaaggtcatagtcatctgacccggcatacatccagatgccatacacccagaagtgggaggggaagcagcctggctggcaggaaaagtagaggctttggccccccaggaatccctgagaaccttaatgtccaccagacagatttcaagagactggcagggccggcggcaggcatcatatgatgtagtttccaacaggacatatccccgagcagccttttggggtatggattcgcatgatacaggttccgaatggctgtggatacaataccgggcctttccaatcacccacccgtcaaaatccttttgtccccattggcaggcagcttgtatgagctttatcatattggatacctctctgaaatctgtcattatattttacttattatagagagtcagcggctgattgtcaacataaaatagaattttggttaacaattaaaaagtatcattggcaggcacctgctggaaggtattcattgccacatgttcgctaatggcatgaggctgcaattagcgcggtggaaacagagacagaattgacaatactgggaatcaatgacatagaaagcccctttccatatcctttccgatatggtaagataggtaagtaaattgagattgtataatgacaggatgaaaagatgaattacattgtttttgatttggaatggaaccaaagtcccaatgggaaggaagattcggtggagcatcttccctttgaaatcatagaaatcggagcagtgaagctgaacgggaattttgaacagacaggaacgttccacaagctgatccggcccaaggtttataaaaagatgcattttaagatatcggaagtaacacacatggatatggcggagctgcgtcaggagggagaaccctttgatgtagttatgaaccgtttccttgcctggtgcggggaagaggagtactgcttctgcacctggggctccatggatttgaccgagcttcagaggaatatggcttatcataaacttccaaacccatttcccaggccccttctatatctggatatccagaagctttactgccttcagtacggggacggaaaaaacaaggtatcccttgatatggcggtacagattcagggaatggaggaggagaggccttttcacagggcgctggacgatgcctattataccggccgcatcctttcggttctggacatggagacgtttggaacctatgtgtcggtggattattacggacttcccaggaataaggctgaggaataccggctgcattttccggaatactccaagtatgtgtccagagaatttgactccagggaagatatccttaaagataaggatataacagatatgaaatgcgtgaaatgcagcaggatgctgcgcaagaagatcaggtggtttccctatggacagagattttatttctgtctggccgtatgtcctgagcatggatatgtgaaagggaaaataagggtaaaaaagtcagaggatgaccgcctttatgctgtgaagacagcaaaaatggcggatgcccaggatgtggagcttctggcccagaagaaggaggacggccggaaaaagcgcagtgccaaggcccaccataaggctgcctccaaatccctgaaggggaaaagcaaacagaaccagccggataaggtgtcatagaaagaaacggagcaaatacctggctgcacttacaatctcccggtccctcaagtttgagagaccgggagatttttgtctgattatgccagatgtttcacgctggagcgttccaccagctttcccgtaatctgggtcttcatgggcatgaaccggggatcctctatgagctgcatcagctggatgacggactgcttacccattatctttctctgtacatgaatggtggtcagggtgggagagcttatggaggaatagggaatatcgtcaaagccaatcagggatacgtcattgggaattttgtatcccttttccttcagagccttcatggcgcccagggcaatggtgtcgttttccgcaaaaaaacaggagggaagcaccgggttctgatccagtattctgaaaaaatcgtcatgggcacccagcatggtgggttttacacgaaactcatttttagagtcaaactgaaaattcaattcttttacatatctgagaaaggctatgtgccgttcattaaagttttctgccccggtggtactgcccaggtagcccaattcggtatgtccgcattctttgcagtactggagggcgatgtggacattttcggcattgttcatgcatacactgctacagtaatggttggggacggtgttgtccaccaccacaaaggggatgggaatggaatcaagggctgaaaattcatcccgcattacctcggttgcaatgaggaacatcccgcagtatttgctgtaatcaatggaatcaagggctgactttaaaccggttttgaccacggtcatggtcatacccagctgctccgcgcggagctgttcctcgatggaatcaataatcatggagatgaatccctgattttcctccaccagcataccgcttttatagtattttaccaggagcacgttcttgccgcttttgggcttacgggcaggaggcatgtactggcaggcttttaccgcatccaacaccttctttcgtgtatcctcactgactcccttttttccgtttaacacaatggaaatggttgcgggtgaaacgccaatctgcttggccagctctctgacggtcatatgaaatctctctttccggattgcagacgttaaattaaacataattgaacaatccatgtgttttactaatcatactataatttgaattataacacagggttgaaactgggtcaattcaatatatgaaattggctgtttactaaacaaaaataaattcaaaaacggctaaaatagggtcgtttattgatttgaacaattaaaatgcacaataaaaacaataatttatggaaaattataacaaaaacaccaaagacatattgacattgaagaaaaatcgttgtactatttagttaacacaaagaacgaggcacacatattgtttagtaaacaatatcaataacaaaaaggaggaaagagtaaatgagaaaaatgaaaaaagttgtcagcgtaattgcagcggctgctatggcagcatccttgctggcaggctgcggaggctcgggaggttcatccaccacggcagcagagactaaggcggcagaaaccaccgcagcagcggcggagaccacggcagcagaggcagcggcagataccacagcggcgccggctgcagcagagaatccggtggcaggcaagaaggtggcctatatcatgcttctgccttccgcaactattttccagatgtggaaagattcctgtgcatctctttgcgatgccctggatgtaaagtttgatttcttcttctgtgacggtgacttcaacaagtggcaggataccatccgtacctgcgcatccgcaggatatgacggactgctggtcagccacggcaatcaggacggttcctatgtatttcttaaggaaatcacagagcagtatccggatatgaagattgttacctttgacacacagttctactccgacggagagtatcagaagcttccgggcgttacccagatgttccagcaggataagtccctggttaccgttcttttggaccagatgattgaaaagtatggagaaggtgtccgtctgattaaggtttggagaggtcctaactacaacagcccatttgaccgccgcgaggttggctggcaggagtatgaggcagccggtaagatcgtgactgtaggcgaggtacagcctcttcaggattctgttgactcggcaaacacagtgactgctgcatatctgcagggcgtgaacagagcggatgtggacggcgtcattgcatactatgacttatacggccagggcgtttacaacgcaattgctgagaatgacaactttaacggcaagaacggcgacgcacttcccatggcatctgttgatattgacccggttgacgtgaccaacatgcagacccgtcctgacatctggaccgcagcaggaacaaccgactggaccatgaacggcgagattggtatgcgtatcctgatgctggagctggcagaccagtatgataagatttttgaccctgcaaccggcgagagcggcgtggatgtagttgaagttcccggcaccgcaatcaaggcggatgcgcttaagtcagattccaccgttgagaatctgggcaatattgccggcgagacttacggaaatctggattatctgtctgctgcagactggatgccaaaggatttgattcacaaataagcggccagtaaaaaacgaggtttttttagaacacaaaaccacaggcaatcgttttttggggaagcgcgggttttggcctgcgtttcccttttttaaaaagattgtatcgctgaaaagagggactccatggataggattaaattagagacgaaacatgtttccattgaatttccgggcgtcaaagcacttgatgacattaattttgaggtgaccaccggtgaaatccgggcagtcgtgggcgccaacggagcggggaaatcaactttgatgaaggtgctggcaggggcaaactccacttataccggagaagtgctgctgaatggaaaaaaggtggaggtaaggacaccggtggatgccaagaaacttggaatccagattgtgtatcaggaagtggatatggcgctgtatcccaccttatcagttgcggagaacattgtacaaaacgatatggtcatgggaaagagcggctatattgtaaactggaaaaaagcatacaagcaggggcgcgaggccctggaccggctgcatatcggccgcgaccaggtggatgaacacgaactggttcagaacctgtccctggcccagaaacagatggtgcttatagcaaaggccatccggtcggaatgtaatttcctgattcttgacgagccgaccgcgccattaagcaataccgagacagaggaactgttccggattgtcaagcatttgcatgaaacggaaaatattgcgattctttttatttcccaccggttaaatgaaatcctggaggtctgcgagaattatacggtgatgcgaaacggcaaaatgattgacaccacaccggttacaggggagactaccactaaggaaatcgtggagaagatgctggggcgcaagttcgaggagaacttcccaaaggaagcctgccagattggagacgtgctgtttcagacagaacacttatccggcgcaggcggcaaggtaaaggacgtgtccatacaggtgaaaaagggcgaagtggtaggaatcgccggactggtgggagccggaaaatccgagctttgcaagaccatcttcggtgcatataaaaagacaggcgggaaagtccttctgaagaacagggagttaaagatagcaaatccctccggggcagtaaagaacaggatggctctggtaccggaggaacggagaaaggaaggcgttctggtaaatgagaatgtaagctttaatttatcggcggcctgtctttcacggttctgcacaggaccttttatccgcaggcggaaagtggacgacaatgcgaagcggtttgtaaaggaccttgggatttccacgccgagcgtgaggcagcaggtcaagaatctttccggcggcaaccagcaaaaggtagccgtgggaaaatggcttgcggcggactgcgatgtatacatatttgacgaacccacaaagggagtggatgtgggtgcaaagcaggacattttccatttgatcaatgaaattgcgaaacagggaaactgtgttatctatgcttcctgtgaaaactcggagctgctgtctttgacagaccgcatgtatgtcatgtacaacggtacggtcatggcagagctggaaaccgctaataccacggaggacgaaatcatgtactactcggttggcgggaaagacaataagaacgggaaataatagacaggagggatacggtagcgatgaaaagtcgtacaaatattaagaggtttttagtggattgggctgcggtcctggcattgatggtttgctttgttgcatttacagcctataagggcaattcctttatgtcaacaagcaatatggtgaatattctcagggcaatggccattaatacggtgtttggtatagcggccaccatcaccatggcgccggatggttttgacatgtcggccggaacactggccagctgttccgcgtatgtgtttgtgtctgcatatctctggctgggacagtcattaggaatgtcaattcttatctgtattctggctactctggttatgtaccagctgaccatgttcctgattcttgtgtgcaagattccggatatgcttgccacctgtgccctgatgtttgtccatcagggaatcggacagtggtatataggcggaggcgctgtctccaccggtatgaagacttcctggggagcggctcctgcacgtaccgcgctttcggaatcattttcagccatcggacgcgctccttggatcattattatcatgctgggctgtgtgcttgtggcctatcttttccttaactttaccaagcatggccggtatctctacgctatgggcggcaataaggaagctgcaaagctgtctggtattgatgtaaagaaataccgctatctggccggtatgattacagcagtgttcatcgccatcggcggtattctggtggcatccaggggaagctcggcccaggttatgtgctgcgataactatttgatgccgtcactggcagctgttttcgtgggacgtaccgtgggcggcgctgagaagcccaatgcactgggaaccatgataggcgccatgctggtttccacactggagaacggacttaccatctgcgcggttccgttctatgttctgccggcagtaaagggtgctgtcctggcacttgcgcttattgcagcttatgcgtctaaaaaagaagattaatcaggaggttactacatatgtcaagatttgatcattattttcagatgaacgtgggggatgtcattgagtatacactggagaagacaacggaaattccctgggaccgcgattccatggaggcagtggttcctccttcccatggcaacctgaactatgtataccgtgtatgggacggcaagggccattccatctacatcaaacaggccggatccgaggccaggatatccaaggatataaaaccatccagggacagaaaccgcctggagtccgaaatccttatgctggaggaccagtatgcgccgggaatggtgcctcatgtgtatttctttgacaccgttatgtgcgcctgcggtatggaggactgctctgattatgctgtcatgcgtgacgccatgttaaagcatgagaccttccccgggtttgctgaggacgtatccacctttatggtcaataccctgcttttgagcagcgatgtggtcatggaccacaaggagaagaaggagctggtgaaaaaattcatctcgccggacctgtgtgatatcacggaaaaacttgtgctcatggaaccttatatggatttgtataacaggaacaatgtatatgcgcctaaccgggattttgtgaagaaggagctctatgaggacgaggcgctccacctggaggtgagcaagcttaaattccgttttatgacagacgcccaggcccttctgcacggcgatctccacacgggctccatctttatacgccaggattcaacaaagatatttgactgtgaattcggaacctatgcgcctatgggttatgatgtgggaaatgtggtggctaaccttatattcgcatatgacaacggcctttccacggacgacggaccgttctgcgactggtgtcttaagaccattgaagagacagtggacctctttatagagaagtttggcaggaaatatgacgaggcagtgacagagccaatggctaaggtaaagggttttaaggagtggtattttgacggaatccttaaggataccgccggttatgcaggtacagagctgcaccgcaggaccgtgggcatggccaatgtggtggatgtgaccaccatccaggatgaaaagaaacgtctccttgcggagcgcatcaatatactggcaggcaaggaatatatcatgaaccagggagccttccggaccggcgccgattacgttgcggcggtgttaagggcaaaggaagcagcccaaaagaccctttaagcacggttgggatataaaaagggattatacaggtttagtagagaaggaggcataaaaaccatgacggtagaggaattttttgaccaggtaatcacggtcagaatgagagaggacagaagctcgctggacatcatagaccagacgcttcttccgggtaccattaagcgcattcatctgaatacgaaagaggaaatatgggaggcaatcaagaagctgagagtgcgcggcgctcctgcaatcggcgctgcggctgcctatggaattgccctgctggcatcgggcattgccgaggaccagtatgacgcgttctacagccggtttaaggaattaaaggattatctggcttcgtccaggccaacggctgtcaatctgttctgggcgttaaaccgtatggaggcggctgtgattgccaacaaggaaaggggcgtggctgcaatcaaggagctgctctttgaggaggcggataggattcgcgaggaggatatccaaatcagccgcggtatcggggagattggctttggactgctgaaagagcttaaaaaggaggggaaggagatcggtattctgacccactgcaatgcaggaacgctggccacggccaagtacgggacagctacagcgcccatgtatattgccctggaaaagggatgggcgggaacagatatgcatgtttactgtgatgagacaaggccgcttctccagggcgcccgcctcacctccttcgagctgtacaatgccggcatcaccaccaccctgcagtgcgacaacatggcgtccatactgatgaaatcaggaaaaattgacattatctttgtgggctgcgaccgggtggccagaaacggcgatgccgccaataagataggaaccagcggtgtggccattctggcaaagcactatggaatcccattctatgtgtgcgcgccgacctctaccattgatatggatacactgacaggcgaccagattcccattgagatgcgaagcccggatgaggtgaccgagatgtggtataaggagcgcatggctccggaaggaatcaatgtatacaatcctgcctttgacgtgaccgaccactccctgattacgggcatcattacggagaaggggatgtgccgcgcgccatatgacaaggcgtttgaagccttgggaatagggaggtaagcatatgctgagtggagtacctgcaagcatttcgcctgagctgctgaaggttctgcatgagatggggcacggggataccctggttatcggggatgccaattttccggctgcatccattgcggcagagaagaatcatattaatatccggtgcgacgggcaccgggccacagacatgctggacgccatcctgcagctgatgcctttggacggctttgtggagaaacccgttaccatcatggataaaatggaaatgcaccgtgaccttaagtgccctgtttgggacgagtttacggatattgtggcaaaacatgacgaacgcggcgcagatgcagtgggctttttggaccggttcgcgttctatgacgcggcaaaggatgcctatgcggtggtatccacctcagagacggcattttatgcctgcattatgatacagaaaggatgcctgtaacggcagagcggagggattttacatgcttgatatattaaaggagcaggtggttgcagttgcaaaggaggcggagcgcctgggcatgtgcaggcacaaatcaggcaatttcagcatctatgacccggagacgggatatgtggtgataacgcccagcggtgtggccagggatgtgctggggccggaacacgtctgcgtcatggaccttagcggtaaggtgattgagagggtggcagaggtcaagccctccagcgaggccatgatgcacctgtatatttataaggaaagaaaggatatccgggcaatcgtgcatacacacgcccgctattccactgcgttttccatcatgaataagcctattatgcccattgtttatgagtgcgcctacctgggcaagacgggaacagttcccgtggcgccttatggacgggccggaaccgtggacctggctgagaaggtggcggaagtgatgaaggagtatgactgctgtctcatggagagccacggcgccattgcagcggataaggacatggacgcggcattcttaaaggcccagtacgtggaggaaatcgcggagatgtattatatcactctggccgccggaaacggggcagaaccacatgccctgccggtggaggaactgcagaagtgggcttatccaaaagaaatcattctttagaaggatttaggaggttctatgaagaaaataataaatgccccggaagcatatacggatgatatgctgcgcgggatctacgctgcccatccggatatggtgaaatatgtggaggatgacctccgctgctactgtacggcaaaaaagaaacagggaaaggtggcaatcattaccggcgggggcaccgggcatctgccgctgttccttggatatgtgggtgagaacctgctggacggctgcggggtcggcggtgtgttccagtcgccttcttcggaacagatttacaatgtggctaaggaagtggaggccggggcaggagtcctgttcctctatgggaattatacaggggacattatgaactttgatatggcggctgagatgctggatatggatgatatcaggacggccagcatcgtgggagcggatgatgtgctttccaataaggacgcccaggttcgccggggagtggccggaatcttcttcatgtataaatgcgcaggggccatggctgcccggatgggaacgctggaggaagtattggacgcggcaaaaaaggcaaaggaaaataccagaaccgttggatttgccctgacgccctgcgtcatcccggaaatcggccattccaactttaccctggcagaggacgagatggcctttggcatgggaatccacggtgagcccggagtgtggaacggcccggttaagacagcgaatgacctggcagaggaatccgtgggggagatactgggagatatgcccctgaatccgggtgaggaggtctgcctgctgattaatggcctgggagcaaccagccaggaggagctgtatattctgtcgggaagcgtgcaccgtattctggaagaaaagggaattaaggtgtaccgcacctttgtgggagaatatgctaccagtatggagatggccggagcttccatatccatctgccgcatggcagaccaggagatgaagcagtggattgacatgcctgtccatacgccgttttacacccaggtgtaaccggtaatacttatctggttggttaaggaggaaatagaatggaacggattacatgccatgaacttccggatctctttcagggtgcggcggatatcttcggggagaaaaaggaagagctctgcgagatggatgccagaatgggagacggagacctggggctgaccatgcagaaagggtttggggctttgccccagctgatacgggataatgaggcggaaggagatattggaaaaacgctcatgaaggcgggtatgaaaatggctgctctggttccgtccaccatgggaaccctgatgtccagcggaatcatggaaggcggaaaggccattggcaaaaaaggagagatggggcccggggagcttgcggattttctggccggttttgccagagggattgcgcaccgcggaaaatgccagttgggagaccgtaccatcctggatgctgtggacgccggggcaaggaaggcccaggaggcctgtgcagaaggcgctgacatgggggccatgctccgccgggcggcagagggcgcaaaggaaggcgtgaaagcaaccgaagatatgcttccgaagtatggaaaggcggctgtgttttctgccaaagccaagggcgtaccggaccagggcgctgtggcgggacaatattttctggaaggattgggtagatattttctataaaaaggatctttttataaaaagaggaccgctctgtccgggcggtcctctttttgctggtctttttattttattcctcgcgcatccggtagccaaccccgatttccgtaaatatgtactggggttcagcgggattttcctccagcttccttctgatatgggccatgtttacccgcagaatctggttgtcactatccgcaaacggaccccatattttggaaataatactctcataggtcatgaccttgccggcattctgggccagcagggaaaccagcttatattcgatctgggtcaaatggacatcctgtccctttacctttaccagccggcgttcaaagtcaatgagaagatcgcctacttcatatttaagactctgggtgccggccgctctctggctgtggcgcagcgcggtgcggatgcgggccagcagctcagccgtgccaaagggtttggtgaggtagtcgtcagctcccaggtccagggcagccaccttgctgcgctccagggtcctggcggaaatcacgatgatgggcagggcgctggtggatctgacctcctgtatgagttccaggccgtccatgtccggcagtcccaggtccagaagtaccacatctggcttaagggattcgatgagcttcagcccgtccgttccggtgttggcgcaggtaacctggtagccctggggggacaggacagtctctatgaagttacagatgttcttctcgtcttcaatgatgatgatgttggctttggtattcatgatttagtattccctccaatctggtaaggtaaatgtaaactgggcgccccgcaggtgatttccggcatggatttcgcctccgtgggcattgattatggttttgcagatgctcaggccgattcccattcctttgtgtccgtcaccggtatggttttccgatgtccctccgccgtcaaaaatcgtatccagcagttcgggagcaatccccttgccgtaatctttgatggaaacagagagtccgcttttttcggaggcagccaccaggtcaatgggcccattggtaccggaatggaacagggcgttttccagaaggttattgattacctgctctatcaaggttgcatccatgggtattatgatgacggagtcgggaatgctgacccgcacctggacatccggaaaccgttttctgaaccgctgcacggattcggatatgacttcttccagggattcgtctgccttgaccacggaggccacgcctttttcgtcctggattctggtgactgaaagcagattctccaccatattgagaagccactgggcatcttcctctatgttcctgaccagcttccgtttttcctcaggagacatatattcctcctgagccaggtaggtggagctggaaccgatgatgctggtcaggggagtgcgcaggtcgtgggacatggcccgcatcaggttggccctcatggtttccttttccgcattgagcagcatgcggtctttttcctgaagctggacattctgcttggtaatcatgatgcagatgctgctggacaggctggatatgagggccatgcccaggaaggtgatgggataaccggacatggtgaaatttaaagtcaggtaagggtatgtaaaggcaaaattcacccagaatacgccgaaaagagaagccaggatgccggcgccgtagcagctggtagcacgggcaatcatgatgatggccagggtgtatatgatggatatatttgttacattgttgctgaagtgaaaaaatatggtggaaactaaagtggctgcagccatatattcaatggtaatgggcagattccttaccagatttatggcagcagccttaaggtcggttttatttatatggaatgatttcattacatattcccctgttggcgttggatgcattccggctgcatagatgaattaacaatttttattatagcgtatgccggggggaagttcaacggaaaaaggattttttgcgcctccgtcccctgcctttttttcccttttctcccagaggaggggaggatacgcggcgctgggccaccagcttttcaaaatccgaggaggaaaaaccgatgtcttccaggcgctccagccttcgctggcgtctgaggtataggtcctcttcttccttcttgcgcacatgaatcttcacggccgccacaatagcaatgatgacagccagggaaaatgcgattcccagaatggccagggtgttggccggaatccggatgctggcagcggtcccttcctttgaagtaatgtcctggcggggggccggggtcggggccggcgtctgcccgtggggagtttctgcattagacggtgcttccggtgtatcctggaggccgggggcgtctgggcggccggatggatccgaaggagcgggattatccgcttctccgtcctggcctatggaaaccgcagaggcgcctgaggcgtcctgggatgtcagggaggcagcgcttccctccaaaccaggagaacacaggtacacggaacccacaggcctgtcattgtacgtatagctgatacaggcaatggctgtctggggatggctgccgtccaaatcataagtaagggcggactgggtgtcggtgaagtcggcatccctgggtatcaccacgcggccgctccggtccagctccagggatatgctgtcgccggaggtcatgccggcaatggtcatgtcattttccagggacttgtacctggtttcgtaatcaacagtccgcagggactgaaaattgcggaaaccaaaatcgaaaagagccttggtatcagagtaatgggactggtggccgttgagcaccactgcaatcagagtcatgtcatttttcctggcacaggtaaccagggtgtttcccgctaaggaggtgtatcctgtcttgcctgcaaaggcgccgggataatatacggcttcatttttatttagcatcttgtggtggttggccacataacctccctccggggtccgcttggtgggagccagctggtagcttcgggtaccgttgatggtgagaaattccgggttctggatggcggctctggctatcagggccatgtcatgggccgtagtgtagtggttttcgtcattcaggccgctggggttgttaaaatggcttcccgtgcagcccaggctccgggccttctcgttcatcagctgggcgaatgcctccctggatccgcttacatggcaggccagggcattggcgctctcattggcagaggccagcatcagagcgtaaaggcagtcccgcacggtcaggacatccccttcatcaatgccggcgctgctgcttccagcctccacattgtatacatcgtcatgggaaaatgtaaccatctcattcagatcgcactgttccagcacaatcagggctgtcagtatcttggtgatactggcagggtaatagggctggtccatgttttttccataaagaaccgtcccggtgtcggagtccatgacaatgcccgcgtcagcctggatggacacatcagagggccattcgggggctgccgctgctgttatggggaaaagtcctgcgcacaggcagaggcatataaacaacataaggaatcgcttcatcctaatattctccattcacttctttgctaagatacagtataaaggatttgcggcttcaagtaaaggctggagaggggcgttatttttgaatctgtgtccattcagcttactttcctgcggttttttatagttaggagcaggcagactccaaagagaatcagggacagggagccaaagagcagggcaatgcgggcagccgtgtccatgaagaagccttccggtacaatgttgatgagcatgtccgtggcagggtccagaatccacaggtcgttgctgaagaagatatggtggaacatgatgaagtatttggtgaagtcagtggatatgatgagtccaagggccgtaatcagcgcaaagaacagtccggtccccatgcacagggaaggcggaaggacccgtcccatcctggctttggtggcagccatgaggatgagaaggccggctccaaggaccaggcatatcctgcggatggacagggccttcaggaaaaggacctgcacatcctccatatgggcgatttcacgttcattgaagaactccctctgttcccctcccatggtggtggtcacatggaggtcctccctgccgcctctgagataatccatcatttcatccgtcacatggagaagatcgtccatggtcatggacggcaagctgtccagcacattgtatttggtgtattccttttcaaaataaccgggcgtccagtataccactgcctccacggaagtgatgaaaagaataatcatcaggcaaaatgcggttacgattccggcggttcggtgtaaatatttcatgattcctcctgtatgatagtatgggataagttttatataacaaagaaaagcccgaccccgcagcttttcgtatctgcaaagtcagaccttttagtgcgccttcagggactcgaaccctggacaaatagattaagagtctactgctctaccaactgagctaaaggcgcatgcgattcatttgtttctttaagtgacacgtccactattataatgcgttttaagaaaaatgtcaacatttttttcgaaaaaagttaattatcaaaaaagttaattatcaaaaaggcttatcgaaaaagttcattatttactgggcggaatcgccgggtatctcctccccgcagataccaccggatctggtgatgcctgggggagggattcctcagctggtttatacagcattacagcacttcaaccaggaattcgcagtaaggatcgccgttggcacagcattttgtctctgttacccggcagggttttcccagggcggtggagaacatgcccgcagccgtacctgcctcgtacacgcatattttggaatgtatattgggaaggccgtaacagtccgcgcattcataatgcctgtagactgcgtgggtttcatcagcttccactacttcctcaaaggcgtatccgtccctctgggcaatgggctggttgctttccatgatttccggcagtgtctttcccctgatttggtccgaggtgatactttctcctatgatacgggatatttcataggcagcctccttcagttccgggtaaaacaggaaggtaagggtctgacgttctctcatataattaaagggcatatggtcgcccaggcggggacggattttcaccccctttttctgggctgcgtatgcgtccgcaaaggaacgcatcacataggaataatcatcagccatctttctggcgtgctctgtgtctatctgaattttacccacggttactctcctttttggtaataatgttttcccgacgcagctggcgcggagcttttcttcctggcaaacagcagcaccacaagggttagtatatagggcagcatctgtaccagctggggaggaatgttgactccctgcagtctgaactggaggctttgggcaaatccgtacaccaggcctcccagcgccacccacagcggcttccagtttccaagtatcaccatggacagggcgatataacctcttcctgataccatgtctttgctgaacatgttgatatccccaatggacaggtaggcgccgcctatggcggcaagcatgccgctggccatgacgcagagatactgcattttatatacgttgactcccatggtgcccgccatctcggggttttctccgatgaccaggattctcagaccggccggcgtcctgtataagaggaaccagagaagaaagacgcagagaaccagaatgtagaacaggggggaaatggtaccaatgatatccccaatgacaggaatttttgaaatcacaggcacacgcagcatgcccagtcccgccaccatgctggacttgcccttggtgccccatatcatttccagcaggacaatggtaatgccggaggcaaagatgttgatgcccacgcctgccaatacatgctcgcatttaaagcccacggtcagagtcaccagaaccagccccatgagaataccggagagggcggcaaagagaaggcccatccaggcgctgcctgtcacataggagcccaccactccgaagaagcttccgatgagcatgatgccctccagccccatattgatgactccggcccgctctgacagcataccggccagggcggcaaaggaaatgggtatggccacccggaccatgccggctaacagggagagaatctgtccgctcatgatgtcaccgccttccttcttttgtacagattttgaatagcaattacgattcccggtgtggagataaacagtatgataagggcctggagaacggagatgaactcgccgggaatgtccgtcatacggttcatgctggaggcacctgcgttaagggctccgaacaacagagccgaggccagggttcccaggggctggttgtgtcccatgaccgcaatggcgataccgctgaagccgtatcctgtggtcatgccggatatgtaataaccttgtacgcccataacttcgcaggcgccgccaatgcctgccagggcgccggaaatgaacatggctgccagcaggtttttcttattgttgatgccggctgattccgcggcaaatgggctgtcccctgtcgcccgcatctcatatcccagctttgtcttgtagaaaaggacccaaaacaggaatacggcaaggagggcaatgaagatgcctgtgttcagcctggtatgggctaccagggataccagccttgcgctgtcttgtatctcctctgtccttaccaccattccctctgatttaaagggattgttcaccaggtattccaccaggtacagagccacatagttcagcatgatggtgatgatgacttcgcttatctgcagcttattcttaatcacagccgccagcatggcccatatgccgccgaagatggcagccaccagaatacatacaggtatgtgcaggacggcgggcagtcccgtgatataagtgcctgccagggcagcaggcagggcgcccgccagaatctgcccttctataccgatattgaagataccggccttggacgccactgccatggccagtcctgcaaatatcaggggaatggctgtgccggcggtctgggccaggttataggtgctgccgaacgcgcctcccagcatggcggagtaagcttccaccggggaataccctgcggctgctatgatgatgcccgccaataccagggagatcaggaaggaaatcaaggtaaatgccatggtacggcttttcagatatttaatcattgtctgctgcctccttccgggcattgcctcccagcatataatagcccagttctgttttggtaaatgcgccggtctccttttcggccacgactctgccctcatagagcaccgcaatgcggtcggccagctttataacctcatccaggtcagcggagatcagcaggatggcggaacctgagtccctcatctgcatgagatgctggtggatgtattcgattgctccgatatccacgcctctggtgggctgggcagccacaataatgttggactggtgaaggagcgtgcgcccgatgatcagcttctgttggttgccccctgacagggaactggtgagctggtcgatgccgtctgtcctgacatcaaactgttttatggtgtccctggcaacctgtttgatgcgcctgatgttcagaaagccgtgtttcacgtattcgggccggtaatggtatcccagaatgaggttttcccaattggaaaatccctttacaaagccgcgtttgccgcgctcctccggaatgtggcccacatagtccagcatcctgcggggagagatggtggaaaccggctgggatccgcagcagacctggcctgtaaaatgattctcaatccctgtgaccacctcaatgagttcggtctgtccgtttccctccacgcctgcaatgcccagtatctcgcctgccctgcattccaggctgatatcagtgagtacggggcggcccttctttttaaggcagatattcttaagacccagcttgacggggccggacccatcgtagggaacccgctgtacatcaaaggatatgggtcggcctaccatgagctcagccagcttgtcttctgtggcctgggcagccggaagggaggcgatgttctctcccctgcggagtatggtgatgttatccgcaatggccagggtctccttaagcttgtgggtaataatgatgatggtcctgccgtccttctttagctgcctgagcatggcaaagagctcctgcacctcctggggggtaaggaccgccgtgggttcatctaaaagtatgatggaagattcgttgtaaagggctttgaggatctccacccgctgtttttctcccacagacaggttctctatcctgctttcaggattcagatcaaagtgataccggcggatgagcgcatccaccttttggcgggctttgccgcgatccagtaaaatgcctttgcgcggttcatggcccaggatgatgttctccgtgatggtgagattgcctaccagaacaaaatgctggtggaccatggatatgccataatctatggcgtcatggggcgaacggatggctgccgggctgccgttaatgagaatccgtcccttgtcggctttataaaggccgaacaaaattttcatcaaggtggttttgccggcgccgttctcgcctaaaagggaatgtatctcgccctgttctaccttgagggatacctccttattggcataggagccgtgaaaggttttggtaataccctgcatctctattgcatacattgggacctccctgtgtgaaaggaaaggtgttgcttgtggtaagcagcacctttcgcagccggttatttaacttcgtctatggttgaaggaactgtgatctcgccggagatgattttatcctttgcggtctgggcagcgtcaaggctggcaggatcaatctctaccttggaaccttcgttggtgatgcccagtgcgtcctccttaagtccgggtaccatggtaccaccttcaagagtaccgtctatggctgatttgatgccgtccttgatgactacatcaatcttgcggatagccgataacatgatgtggtccgggtcgatgagacactggtttacatctgcgccgatggccttaaaggttccctgctgtgcagcgttgaacacgcccagtccggaaccgccggcagcggcaaaaatgacgtcggcgcctgcgtctgcctcagccagtgccagttccttggcagtggtggtatcggcaaaggagcctacatatttgacaattacctccacatccgggttggcagccttggcgccggccatatacccggccacgaagatattctgggatgggctgtccacgccaaccaccatgcctattttgttggtctttgtgttaaggcccgcaacagttcccaccagatatgttttctcattgtccttaaacaggacgctggtcacgttgtcacatcctgtcacctcgccgtccacgaacaggtatctctgctccggaaactcggaggccaccttctggagggcttctacggcatcaaagccgccgccgatgatcaggtcgtatttgccggatgcggagaggtcggtaaagttggcttcaaattcagatatttccttgggctccaccagctgatactcgattccgtaatcagccttggcagcttccacaccggccagcatgctgtcattgaatccgccgtctcccagtccgccgatgccgatcataagggcaaccttgaaaggctctgagccgccgctggggacggtctgaccgtcagccggagcttttgcatctgcttccttggaggctgagccgttggaatccgtttcgccggagtctgccgctgtctgggttcctgcgtctggtgatgaagcagccttgccctggcatccggccaatgatacggtcatggcggctgtcagcgccaatgctgtaaataactttaaatgtttcatgatagtttcctcctctgtgtatacccgctacatgtccaggcggttctgtacggccttgggcatctctataatgttttcaccgcagtggcagttcatagtctcaggattgatggcagccatggcttccagcatgacctttcccaccaccggtgcgcattccgaataaatgtcaaaaatggagcgttcccagttgggattgattccctcggccgaattgctgataacatacagggccgcgtagcaggcgccgatggccctggccaacgccgcttccggcatcatggtctgtccgcacacatcgcagtgatccgcgtacattttctggatttcagcagctgactcgaatctgggggcttccgcaacgccgtagatgccggtgcggaacacacggcggaatacgccggaggccttttctaaaagtatcctgtgcaggtcgggacatatgatttccctcatgcgcatgctgtagggggtgaattttcccagataggacacacgctttgtataatcaatgaaatcctggggacatatgatgtcgcccggctccagcaggggattgatgccgccgccgctgccgtctgccagtatgtatttcacgccggcttccctcaatgcccagaaaatgcgctcgctgggagtgtcattgtaaggtgagagtcccttccagccgtggaaaggcacataaagtacctgccggtttttgtgatctgccgtgatggaggcatccatttcgtacagtttcatgcaggcggtgactccaaacggggtttcaaattccatgtcccgttttaacagggtaatgccttccatatttaaatcttcgggaaattcgcatccccaggttcctgagccaccgatgtggcagtacatggtctttggtatttctttgcaaatcataacattccctcacttatattttatttacctaggttaccgtaattctattaatcccaaggtgattattcaagtgagggggagtcgaaaagaatagaaaaatggagatgccccttgtatctgtctcatattgagactataatctcattatgagataaatgggggaaagaaatgaaacgatccgtattaagcgcttgcgcagccattgtgcagaaggagattgaattttatgcgggatttacctgcctggagtacgatgtgaacgatgagaataccatgagagttgcgggcacaggcattttcaggtccattatctatgccaatgaaaaccagccctacagcgccattgaacaggccaagacggacaggaagcctgtatttgtgagaaacaggaacagcagcatctgccgcaaatgcagcaccaaccgcatctgtacgggaaaggcagaggtggtggtgcccttgtatatcaggcaggcctttctgggaactctgtccgtgctgtgctatgatgagaagatacacaaggatatgctggaacatacagaatattataaaaacctggcggttcatgtgggacaggtcattaccaggattgcggagtcataccttcttgaagatgccctgcatgtgacggagcacgccctttccgacctggtggattccatggaggacggggctgtcctgatagagaaccggcgggtgtcaaaggtcaacaagaatgcccggatccagatgcagagaatggggataggagaggagctgttccgggaaacggtgaaggtcattaagagaaggaacagcaactggctggatatgagggcggagaacaggagtatccgccttcacgcaaagcaccagatttttgattctgagttccttatgggaaaacggctggagtatgttgtgctggagcagaatcttgtgacggagcagagctatttccaggatgccagcaggaatctgtctctggactactttgagggaaccagcgaggttctgacgaagatgaaaaagaacgtgatgaaaatttcggaaataagccgttacatggtcatacagggggagaggggactgggcaaggagatgtgggtaaaggccatacataacagcgggcgctatgcccagcaggagctggtgatatttgactgcaatgcattttcggacctgaattttgccaaccaggtatttgatgaggagaccggcatattctgcagcagggatattaccgtgtgcttaaaggagattcccaggcttccttactggcttcagctaaagctggcggataacattaccctgctggaaaaccacaacatccgcctcattgccaccaccctggaggacctgtctaagatggctgaccacaacgcgttttccaagcgtctctttaacctgttttatcccgctatcctgtgtattccgccaatcagggagagggatatggatatagactactatattcagaagtatctgatttactatcaggattttgagaaaaagaaggttgcctgcagctccagggcccttaccatgcttaagaaccattcgtggcctggcaatttcaaacagatggaacaggtcttaagctaccttatatccataaacaccagcggaatcatcacggaagaggacgtgcttcggcttcctgattttaaacagaacgacgggccctttaacctgaaggagcaggaacggcagctgatacagaaagcgctgcagcgttttacaggtccctacggcaagcaggccgcggcagatgccctgggtatcagcaaggctacgttataccgtaagatacaggaataccgcctggatgaagcataggacagagcgggggaggacaacaaaaaagtccgaccccgcagcttccaatatctgcaaaatcagaccttttagtgcgccttcagggactcgaaccctggacaaatagattaagagtctactgctctaccaactgagctaaaggcgcatttttttcattttgttgtgcggctgtctcaacagcacgttcgccattatatcgcctaaaaagcaaaatgtcaacacttttcgagaaaaaatctttggaaatttttttgccgggagttccatggtttttagttgtggctccttttggaatccctgcgtccgcggctgcctgttcctgtgaaaaacagacagctgcggatgtgtcctcttttgggaggttattttttatccttgtcctttttggccttggctgaaccggagcccaggagtttgccgacttccttaaaggaacggttgaaccggagagcctgtttgtttaagtctgtcttatcgctggtggcctggagcagttttttggtgattcccggagggagtgccatgctgtccgcctcctgatggtatcctttacctgtattctatgccgggtcctggccgaaggttcctgtccgccgggcaatgagcttgcagatgggcttgccctcggaggcgaatttcatttcatactctgtcatcacatttccttctgccatggggctgttgtgaagatcaaaggtatactctgtaatctcccagccggcatctggaatggattccagggaatattcaaacagcccgcggttatctgtcttgaattcaacaacaccctggggcgccagaattttgtcgtatacagacataaagacaggggatgtgagccttcgcttggcatggcggtcctttggccatggatctgagaagttcaggtatatccgctccacctcgccgggggcaaagatctccgccatgtccttggcgtcaatgcacataaaataaatattttcaaggtccatttcgctgcgtttctggagcccccgcagaaggacgctggaatagcgctcgattcctatatagttgatatccgggctggcggatgctttttccatgatgaaacggcctttgcccatgcccacctcgatttcaaggggatggctgtttccgaatacctggttccatgtgccgcggtggtgttccggttcctgaatgacaaatgggctggaggcaatggtttcctcggcaccctggatgtggcgtaatcgcatgtgtttcatcctttcgtgatatagttgctgcaggccttattttaacattcaaaagatgcatttgcaacaaaatttacttttttcttatttttctgattttttataattaatagtgcaaaattagcaaaaatctagtatactatacataataggcggatatctgcgatactaaggaggaaggcttatgtcgaatgtggagcggacgaccagctggcagcagattcagcagggcgttaaggaagcagagcgattaattgcgcgcaaggaatataatcttgtgatggtcagagccagacaggttctggaatatatggtaagatgcatggctgagagagcatgtgtggtggaaggggatttgtccgataccatagaccagctgtacgaaggccagtggattaacaaggccaccaaggacaattaccataccatccgcatactggggaacaaggcggttcatgagggggatgacacggcgtatgacgccaaccaggcattccagctgctgacccaggaagtgtatgtgtttgccaatgaatttgcaggaggttcgggcggccgtccggtcagaacgtcctccgctgcaaggaatacatcagggcgcccggcgcccaggcagggaaccggcggaggcaggagcgcttccggcaggaacagccagagggtacctgccaggaatacacgcagcggcccgtcccgccagggcggtcccagaaagaagcgcagacgggtatctccggcagcatacatattgagactgctgattccggtgctgcttgttatacttctgattgtggttatccgtgtttttacatcggacaagggcaaggatgcagataagaccaccacggccccgaccgtgaccactgcgcctgtggagccggcgcctacacttcctccggaaccagagacagagccggagacagagccgcccgcagagacttacaggattaagggcagcagcgtcaatgtccgcagcgagccctccaccagcggccggattctggtacagctgggcaacggcaccgaggtggtgtacgtgaagcggtatgacaacgactgggcggttattaactacgacggccaggaggcgtatgtatccagcaaatatattgaaaaggtagaacccgtggcatcaaccgggggggagactgagggcagcgaggcccagacagccaattaggctcatgtatttgtgaaaattgtataggaaaaattggtaattttggatgcaaaaagaggaagaatttaaaaagttcttcctctttttggcgttttgcagtggtgaaattgtgaaaaattaattttaaaactaaaatacctctggtttttttctaaaaaaggagtatcatgaaatgatatgaaaatatataaggaggagagctatggatactgtgattaaccgtctatcggaaatcgaagcagcggccggagccattgtggaagaagcgaatgcgcgcaagaaggcatttgctgaggagatggacgcaaagacggctgcctttgataaaagcatggaacaggaaacggcccgcaggattgcagagattcaggagaagatggaggcggacatgaacgggctccttgcaaagcagaaggcggaatcagaggccctgcttaaggagctggaagataattataaccggcaccatgaagaatatgcagaggctctgttccagaagatgataaaggggtgagattatgggcagcctgattgcttacagcggcattgccaccaaggtgaaggcaatggaacgctggcgtataaaagatgagcagttccttgagatggcggccctggaaaccgtaccggatgcagtgcagtatctgcgcgccttcctgccttaccgcgagatattcggacaggtggaggacaaggatctgcacaggggaaacattgagcagcatctgaatctgtcccagtacagggattttgcaaagctttaccagtttgccaatataaagcagagacgtttccttgacctgtacttcatgcactatgagattaccattttaaagacctgtctgagaaatgcggcaggacacagggaacagcggcaggatctgtccatgttccgtgatttctttgagagacattctgcccttgatctaatcacactttcccagtcccaaagcatggaagagtttatagggaaccttaaggggtccgcgtattacgggccgttgtaccagatgctgcagaacggcagggtaacccttccggcctgtgagacagcgctggatatgctgtatttcaggtccatgtggaagactaaggataagtacctgtcaaagaacgagcagaagataatcgcccagtgcttcggcaccaggatggatatgctgaatttacagtggatttgccgttccaaaaagttttaccggctggagccgggggaaatatacgccatgctgattcccatacagctccatctgaccaggaaagagattagccggatggtggaggccgagaacctggatatactatacggactcatagaggcaagctggtacggcaggacaggtctggtccatctggacgaggatcaggacctggaccatctggcccacgatataatagacaggatttacctgaagacaagcagaaaagacccatactccatcgccatactgaattcctatctctacttcaaggagagggaaatcgagcgcatcatcactaccattgagaagatacgttatggactgggagcaagttgactaaagggggttaagacgtgattgagaagatgaagttcttaagtattaccggccctaaggaggatattgaccgggtggtggacacgtatctgtcaagatatgagatccacctggaaaatgccctgtcggagcttaagacagtaaaagacctgaggccttatattgaaacgaatccatataaggatgtgctggaaagggcccaggggctggtggaaagctatcatgacctgataacggaccagacggaccggaacatgaagctggaggaggccgttgaggttattaacagccttgacacccagcttaaggaactgacagaccaaaagaacgccctggtgcaccagcgggacgagttaaaggcttccagggacagggttataccctttgcggggcttaactacaatgtgaaggagatacttaagttccggtttatgaagttccggttcggacgtatttccagggaatattacgagaaattctcatcctatgtgtatgagaccatagacacggttatgttcaaatgcgaggaggagggagactatgtatgggtggtctactttgtgccggagagcctggcggacaagattgacgccatctatgcatccatgcattttgagcggtgtttccttccggatgagtacgagggcactcctgtggaggcaggacatgtactggacgacaggatagggagccttcaaaaggagatagacgaggcggacaggaatatcgtggaggccatgagcagcaggaaggacgagtttgccgctgccttaaggcgcatcaggacattttccaccaactttgatgtgaggaaaatggctgccgtcaccaagcatgacacccataacttttacatcctgtgcggatggatgacggagaatgatgcaaagaggttccagaaggaaatcgaatgcgacagcgataccttctgtattatcgaggacgaccacaacaacatcatgagcacgcctcccaccaagatgaaaaatccggggctgttcaggccctttgagatgtatgtggaaatgtacggactgccgtcctataatgagctggaccccaccatactgattggtattacttactccattttgtttggtttcatgttcggggatgccgggcaggggctgtgcctgctggttggaggatttctgctgtaccggtttaagaagatacgtctggccggaatcatttcctgctgcggcgtgttctccaccatattcgggctgctcttcggaagtgtctttggatttgaggatatcatagatgccgtgtggctcaggccccaggaggccatgacagatctgccctttatcggcaggctgaacacggtatttgtggtggcggttgccattggaatgggaatcatccttttatgcatgattctcaacatcatcaacagcctgagaacccatgatgtggagaaggcgtattttgacactaacggcgtggccgggctggtattctactttgccctggcatccgtgattgtactgtatatgaccggaaatccgcttcccgccaccgtgattctggtaatcatgttcctgattccgctgctggtgatattctttaaggaaccgctggcagccatattggagaaaaaggcggaacggatggaaaccggcctgggaatgtttatcacccagggtatatttgaactctttgaggtgctgttaagctatttttccaacaccctttcctttgtccgtgtgggcgcgtttgcagtgagccacgcagccatgatgcaggtggtcctgatgttagcgggtgcagaggcgggaggaaataccaactgggccgtggtggttggcggcaacctgtttgtatgcggtatggagggcctgattgtgggcatccaggtactgcgtctggaatactatgagctgttcagccggttctaccgcggcagcggcagggcatttgaaccgtatggaaaggctgccggagagcagtaagcatatataatacaaaaaggagatatgagatatgagtttattagttaaaattacactgagcgcagcacttattttaagcattgcagtaccttttggggcatttgcagcaggggaaaagacaaagggacgctataagacagccctggcagccaatgtattcctgtttttcggcaccatggtattcgcggcagtggtcatgttctccggcaatgcagcggcagccgagacaggagcccaggcagccggttcatccgcggcaggcatgggctatctgtcggcagcactggccacaggactttcctgtctgggcggcggcatcgctgtttccgcagcagccagcgcagcactgggagctatcagcgaggacagctccatccttggtaaatcattaatcttcgtaggtcttgccgaaggtgtgtgtctctatggtctgatcatatcctttatgatcttaggaaagctgtaataccatgaagatgtaccttatcagcgacaacatcgacaccctgaccggcatgcggctggcgggagtcgagggggctgtggtccataagagggaagaactgaaggaagaactggataaggccctggccgataaaaccatcgggatcatcctgctgacagaaaagttcggcagggaatttccggagatcatcgacaatgtaaagctggagcgcaagcttccgctgattgtggagattccggaccgccatggaaccggccgcaagccggactttatcacctcttatgtgaacgaggcaatcggactgaaactgtagtaatgatagaaagagggtgaatcagcttgacaacagaggaaaagctaaagcatttccaggatatctgcatgacggatgccagagagcgcagcgccaggatgttagatgactatatgaacgccctggaggctgcctttgaggagcatgcggctgacgccagaaggcgggccgacatgcaggtggaggcagagacagagaagctggagcgtgaaatcaataaaaggctgtccatcggccagctggatttaaagagggaggccagccacaggcaggaggagcttaaggataagctgttcgtggaactgcgggacaaactggccaactttatggagacacaggattaccagcggcttctggaccgccaggtaaaggctgccaaggaatttgcaggggatgaggaactgattatctatatggacccatcggatgtggataagctgcagcgcattgccatgcaccacaacgccaccatcaaggtcagcgaatattcctttaacggaggcaccagggctgtgcttccgggcaagcatatacttatagacaactcattccagactaagttagacgaggcccgccatgagtttaaatttgacttgacaggaggtaggcaaagtggctaagacaggtgtgatttacggtataaatggtcctgtcgtttccctgctgggcgactcagggttccagatgaatgagatggtgcatgtgggccaggagaagctggtgggcgaggtcatcggactgaactcagagaagaccaccattcaggtttatgaggagaccagcggaattaagccgggagaaatcgtgactggtacaggcgctcctgtatccgttacactggcgccgggaatcctgagcaatatatttgacggaatcgagcgtcccttaagcgagattgccaagggaagcggatattatatcagcagaggtatatccgtcaacagtctggacacggataaaaagtgggacacccatatggtggtgaaggaaggggacagaatcatgcccggcaccatcattgctgaggtgccggagacaagggctatcacccataaggttatggcgccgccggacgcggaaggctatgtccttacagtggtgccggacggccggtataccatagaggagccgcttctgacccttcagctcatggacggcactgagaggatactgaccatgacccagaaatggcccatccgtgtggccaggccgtctgccaggcggttcccggcagtgaagcccctgattacaggccagcgtattctggacaccatgtttcccctggcaaagggcggcacggcagccattcccggaggtttcggcacaggcaagaccatgacccagcaccaggtggcaaagtggtcggatgcggatgtcatcatctatattggctgcggtgagcgcggcaatgagatgacccaggttctggaggagttttcagagctcatagacccaaagacaggaaatccgctgatggacaggacgaccctgattgccaacacatccaacatgccggtggctgcccgtgaggccagcctgtattccggccttaccctggccgagtattacagggatatggggtaccatgtggccatcatggctgattccacctccaggtgggcagaggccttaagggagctgtcaggccgtctggaggaaatgcctgccgaggaaggtttcccggcttacctggcatcccgcctttccgcgttctatgagagggcgggcatgatgcagaacctcaatggaacagaaggttccgtgaccatcatcggcgcggtgtcgcctcagggaggcgatttctccgagcctgtgaccatgaataccaagcgttttgtgcgctgcttctggggactggataaatccctggcttacgccaggcacttcccggccatccattggcttaccagctattcggaatatataaacgacctgtcctcctggtacatggacaatgtggataagcggtttgtggatgaccggaaccgcctgatggcgcttctggtgcaggagagcagcctgatggaaattgtgaagctgattggagccgacgtactgccggatgaccagaagctggtgcttgaaatcgcaaaggtgatccgtctggggttcctgcagcagaatgcattccacaaggacgacacgtctgtgcctttgattaagcagtttaagatgatggaagtcattctttacctgtataaaaaatcacgttcccttgtgtccatgggcatgcctgtgtccgtgctgaaggaggagaacatatttgacaaaatcatatccatcaaatacgatgtgcccaatgaccgcctggaaatgtttgatgactatatgaagatgatagacggtttctacgacagggtcgtggaacggaacgcgtaagggagggaggtccatatggcaattgaatatttaggtttaagtgaaatcaatggccctctggtggtcctggagggcgttcagaatgcggcttatgatgaaatcgtggaaatgactgtggccggaaatctccacaagataggacgcatcattgagatatacggggacaaggccatcatacaggtgtttgagggcacggacggcatggccctgcgcaatacccatacaaggcttacgggccatcctatggagatagaggtttccgaggagatgctggggcgtacttttaacggtatcggccagcccatcgacgggctgggcgacatcatatccgacataaagctggatatcaacgggaaacccttaaatcctgtgacccgtgagtacccgagaaactatatccgtacgggaatttcagccattgacgggctgaccaccctgattcgcggacagaagcttcccatcttttcgggaaacggtcttccccatgaccagctggctgcccagattgtgcagcaggcctccctgggagaaaattcggacgaggaatttgccattgtgttcggcgccatgggtgttaaatacgatgtggctgatttcttccgccgtacctttgaggagagcggcgtatccgagcatgtggccatgttcatcaacctggccaacgaccctgtggtggagaggcttatcacgcctaaaatcgcccttaccctggccgagtatctggcctttgaaaagggaatgcatatactggttatactgacggacatgacctcctatgccgaggccatgcgtgaggtctcctcttccaagggcgagattccgtccagaaagggatttccgggctatctctacagcgacctggcttccctctatgagagggccggcattgtggcgggacggccaggttccgtgacccagataccgattctcaccatgcccaacgatgatatcacccatcccatccctgacctgacaggatacattacagagggccagattgttctggaccggcagctgaacgggcagaatatctatccgcccatcaatgtgcttccctccttatccaggcttatgaaggacggcatcggcgagggctacaccagggcggatcatcaggacgtggccaaccagcttttctcctgctatgcaaaggtgggggatgccagagccctggcatcggttatcggcgaggacgaactttcacccattgacaagaaatacctggagttcggcaaggcctttgaggagcattttataggccaggccccccatgagaaccgcaccatcctggataccctggatataggctggaaacttctgggaatgctgcccagggaggaactggaccgtatcgacaccaaggtgcttgaccagtattataaacctgcggataccatgaaggagtgatgtaaatggatccaaatacatttcccaccaaaggcaacctgatagcggcaaaaaattcactgggcctggcctatatgggctacggactcatggataagaagcggaatatactgattcgggagctgatggagctgattgacgaggcaaagggaatccagtcagagatcgacagcaccttccgggaggcttatgcggccctccaaaaggcaaatattgagctgggcatcaactatgtccaggagataggcgcctctgtgcccatagacgaccgggtaaaaatcaaggccagaagcatcatgggtacggaaattcccctggtccagcatgaatcacggcctttggccctgacctatggtttttataacaccaccgagtccctggatgaggccagataccattttgagaaggtaaaggagctgaccatcaagctttccatggtggagaattccgcctaccggctggccaactccattaagaaaacccagaaacgtgccaatgcccttaaaaacatcaccatacctcattatgaggacctgagcaagtccatctccaatgcgctggaggaaaaggagagggaggaatttacccgcctgaaggtaatcaagcgcaataaagagaaggtgtaggaggtttttatgtatacatttgatgaccttgtgggaataatagcaaagctgcggtcacctgagggctgtccctgggacagggagcagacctttgagagcctgaaaaaatgtctggccgatgagaccgaggaagtattccaggccatagacaacaaggatatggaaaacctgtgcgaggagctgggggacgtactgctccaggtcatcctgaacagccagattgcaaaggaagaaggcaggtttacgattgacgatgtaattgacggattatgccgaaaaatggtacgaaggcacccccacgtatttggcggtgtaaaggtgaattccgtggaggaaggaaccgccctctggaatcagataaaaatgcaggaaaaagccaaaaaaccttgacaaatcatagcaaaacagatataaatgattaagtacactatgactttaaaatgtaacgattccggggcctttcccggacaatatctaggaggaaaaattgatgaacaagacagaattaattgcagcagttgctgagaaggcagagctttctaagaaggacgcagagaaggcagttaaggctttcacagacgctgtatctgaggagctggttaaaggcggaaaagtacagttagtaggcttcggaacctttgaagtatctgagagagctgcaagagagggaagaaatcccaagactggtaagacaatgaccatcgaggcttccaagactccaaagttcaaagctggcaaggcattaaaggatgaggttaataaataatccatgagattggacaagtttctgaaagtttcccgccttatcaagcgcaggactgttgccaatgaggcatgcgacgccggacgtgttctggtaaatgataagccggcaaaagcgtccgtcagtgtaaaaacaggtgatatcatcgagattcagttcggagccaaggctgttaaggtggaggttctggacgtacaggaaactgtgaagaaggatgaggctaaggaactttaccgttatatttagcggcagtttgcattggatgttttaactgctgcaatatttaagataagtggcatagaatggccaacctccccatatatttaacataggttagatatacggggaggttttttgcatggaagaaaagattggaagcaatcgtcagcataagcttatactgcagaaccggggcaagggaaatataaccggcatatgcgatgtggtgtcttttgatgaaaatgcagttgtcctggacacggatatgggtctgcttaccatcaaggggaaggagcttcatgtaagccgcctgaccctggaaaagggagaggtggacatagagggaaccatagacagcatggtctacagttccaatgaagccctcagaaagtcgggggaatccctgttcacccggctgtttaagtagggggcatcatgagcagcaggattcagtatgaagcctggctgatggtgctcagcctggtcacaggcggttggctcatgctggcctatgataccctcagggtgttccgcctggttatccgccacggccccttctggacaggggtggaggattttttgtattggctttatgcggggctggtgacctttattcttctctatgagcagaatgatggcgtgttcagggcctatgtcataggaggggtatttgcggggatgattctgtatgacaggtttatcagcagaattttctttaagtgcttgaaaaaggccggcaaatgccttagaatgattattactaggcacagacagaaagctgtctgcagcccggaaaaagacggagctggtgattgagcagatgaaatcctacggtaaatcaaggcgtgtaaaacgcgataaatggacgaaccgcatggccatcatgggtattaccctggtagtcatgtttttggctgtggcaatcaatataaagggcgctgatcttaagaaatcggacctggaatacagcatccgtgaacagaacctggagcagcagaaggaagaggaagaaaagcggaccgctgagcttcaggaatacaagatttacgtcaagaccaagcagtatgcggaggaagtggccaaagaaaagctggggttagtgaatccggatgagattttgttaaagcccactgagtgatggcgaaaacaggcgaacgatttttaaaaattcatgcatgaattgacatatatttccctcctgggtgcgtatactgaaagttacgcggattaggagggatttttgtgtttatcagagagcgggaagtaaagggaagaacagatgtaaattattatacggccaggagactgggggatatggcagagtccttaaaccagctggccaaagcgtttgacgacggtatagaaaaaaacggacagctgacaaaggatgatggactggccgccatgcaggccagcgctgccctggtgtgcgacaactgcagcaggtgtaatctgtatgcggacagcgagaaggaggacagctattacctctactatcttctgcgggcatttgagcagaagggccatattgattttgaggacatgcctcagatgtttcagagcgggtgccggaaaaaggaggattatcttgcccagctgaaccggagcctgggaagggctaccatgaacctgtcctggaagaaccgtttcctggagagcagggacgcggtcatatcccagttcagggagctgtcggtgatactggaggaattttcccaccagattgaccgtgccagggatattacggatgagtatgaatacatactgaaaaaatattttaaacgctatcatgttgccttgggcaacctgctgttattggagtacgagaacgggcagaaggaagcttttttaacggccaggaccaccaacggccgctgcattacatccaaggatgcggcgctcatcatgggagaggtcatggatgggacaaggtggagtccggccaaggacagccgcagcattatcaccaagcagtatgaaaccgtgcgttttctggaggagggagggtaccgtatgctctatggagcatccaggattccaaaaaagggcgaaaagtattccggggataattataccttctgcgaaagtccgggaaaccaggtggtcatgagcctttccgacggaatgggaagcggggagacagcggccagggagagcaagcaggtggtggaactgacggagcagcttctggaaaccggattttccccaagggccgcccttaagctggtgaatacagtgcttttgctggctggtccggaacagcacccggctactctggatctcagctgcatcgacctgcataccggtgttctggaagccatgaagctgggggcagtgccaacctttataataggggaagagggagtggaaatcatggaagccggggaagtgcccatgggaatactgagcgaggtggaaccggtgcttatgtccaggaagctgtgggagggcgaccggattgtcatggtcagcgacggggtgctggatgcgctgccgggaaatgataaggagcaggccatgcagcagtatctggagagcgtggaggagatgggaccccaggaactggcggaccaggtactggattttgcggtatcctttattccggctccaagggatgatatgacggtcctgacagcaggaatctggaaaagacgttcataatttacagagacaggcttgcaaggagggacgtttgcgggtatattataagaaatagacagagataaacaatatcggacacaggagagacaggtggaaggactggagcacagggtcagagagaccatggaacaatatcatatgctggagccgggcgaccgagttattgcagcagtttcaggaggggcagattccgtctgcctcttagcgctgttatgcgcatggagggaaccgcggggaatcagtatcagggcgctccatgtccatcacgggctcaggggagaggaagctgaccgggatgcggattttgtcaggtcattgtgtgaagggcttcatgtcccctgtcatatcctaaaggtagatgtgcgcggcctggcggctgagaagggtatgtctgaggaggaggccgggcgttttctgcgctatgaggcattggagaaggaggccctggactgggaaggcgaggaccgggccagcgaagcccggagcggacaggacggagattgggcggatggagattcggtggacggagattgggcggatggaggttcggcggacggaggtccggcagatggagatttggcagatggaggtctggcggatggaggtccggcagatggcagtttggctggcagcagcctcagtcccgtgaaaatcgcggtggcccaccacagcggggaccaggtggagacgattctccacaatctgttccggggaagcggtctttttggaatgaaggggatcgtctaccggagaggcaggattatccggccgctgctggacgtggaccgggactgtatccttaagtggctggcggaccatgatctgccctatgtgcaggattccaccaacgatacccttcactacacgcgcaacaggatacgcaatcagctgctgccggagattgagcagtatgtaaacaggggagccgcgggcaatatactgcgcctggggcgtctggcggcgcaggcagacgagtacctggaaagccaggcggctgcctggattaaggcccatgtgaggaaaaacccaggggcatacattccggccgaggtgtttttgcaggagccggagatactgcggtcctatgtggtgatgtcgctccttaaggagctgggaggagcctccagggacctggggctggttcatgtgagccaggtcatggagctggccgggcgggccgtgggaaaacaggtggatttgccctacgggctgtcagccataagggagtacgagggaatctggatgggcagaggagacccggcgtcagaggaagaatggggagacctgcctattgtggatatggaggttttttctcggaaaaaagggatggaatttcctaaaaatgtgtatacgaaatggtttgactgtgataaaataaagggtacgcccgtggtgagaaccaggcgtccgggggattttatcgtcctgtcggacaataaccacaaggcgcttaatcgttttatgattgatgagaagatacccagacagatgagggataagataccccttctggcagatggcagccatgtgatgtggattataggataccgcatcagcgagtattacaagataggaccggatacggtccgggtgctgcaggcagaggcaggccagactggagagagaaaagaataggtgaaacggaggataaggtaatggctgacagaattcgtgttttattgacggaagaggaagtcgataaaaggattaacgaagtagcggcaaaaatcagcgaggattatgcaggaaagcaggtccacatgatatgcatattaaagggcggagtattctttacctgcgaactggcaaagaggatgacggttccggtgtccctggactttatgtccgtgtccagctacggcggcggcactgtgtccagcggcgtggtcaggattgtaaaggacttggatgagtccctggaaggcaaggatgtactgattgtggaggacattatagactccggccgtacgctggcatatctgattgaggtgttgaagcagagaggtccaaagagcatccatctgtgcacacttcttgataagccggagcgcagggtgaagaagcaggtgaaggtggactatacctgttttacgataccggatgaatttgtagtgggatatggactggattatgaccagaaataccgtaacctgccttacatcggagtagtagaattggatgcagaataagaaggtctaaggaggcaattcggtgagacagcagcagacatttagaggatttatattcatacttctgatgctgatcttaatcgccaccgcggtgagattcccttacgcaaggcaggcggataaggtcacaaatcaggattttatcaagatactggaggatggccaggcggcagacgtgagcatccaccagaatccgcagactcccacgggagaagtggtactgacccttttggacggtcaggtgaagcggctttatgtttcggatgttaaagacgcacagaagcttctggaagcccatgacatggcgtatacgaccatggatgtgcctcaggagaattatctggtgaccatcatccttcccttcatgctgtctattgtggtggtggttatcatcatcatggtcatgaaccggagtgcgggcggcggaggtgccaatgccaggatgatgaactttggcaagagcagggccaggatgagccgggacagcaaggttaatttttccaatgttgccggtcttgtggaagaaaaggaagaactggaagaggtggtggatttccttaagaatccccagaagtataccagcgtgggagccaggataccaaagggccttctgctggtgggccctccgggaaccggtaagaccctgcttgccaaggcagtggcaggagaggcgggagtaccgtttttctccatatcaggttctgatttcgtggagatgtttgtgggtgtgggcgcttcccgcgtccgtgacctgttcgaggaggccaagaagaactctccctgtatcgtgtttatcgacgagattgacgcggttgcccgccgcagaggtacaggtatgggcggcggccacgatgagagggagcagacactgaaccagctgctggtagagatggacggctttggcgtcaatgaaggcattatcgtcatggcggccacgaaccgcgtggatatcctggacccggctatccttcgaccgggccgttttgacagaaaggtggcagtgggacgtcccgatgtgaaggggcgcgaggaaatccttaaggtccattccaaggaaaagcctctcagcgaggatgtggatctgcacagggtggcccagaccacgtcaggcttcacaggagctgacctggaaaacctgatgaatgaggcagccattatatccgccagggaaaaccgcaggttcatcaagcagagcgatatcgaccgggccttcgtgaaggtgggaatcggtgctgagaagagaagcaaggtaatatccgagaaggataagaagataacggcttaccatgaggcgggccacgccatcctgttccatgtgcttccagacgtgggaccggtgcacactgtgtccatcatccccacgggaatcggggcagccggttacaccatgcccctgcctgaaaaggatgagatgttcaataccaagggccgcatgaagcagaatatcatggtggatttaggcggccggattgcggaagagctgatatttgacgatatcaccaccggcgcatcccaggatatcaagcaggccacccagattgccagggctatggtgacccagtacggcatgtctgagaaggtaggaatgattcagtacggcggcgatgagaatgaggtatttatcggacgggacctggcccataccaagtcctacggcaatgaggttgctgacaccattgacagtgaggtcaagcggatcattgacgagtgctaccagaaggcaaaggatatcatcaagcaatatgactatgtactccatgcctgcgctgatttgctgattgagaaagagaaaatcagccagtctgagtttgaggcgctgtttacaccggcacagtagcaaaacattccggttctgttttgggccgggaatgatagaaaatagtataaaaaaagggagggaggctataaagccccctcccttgtctatattgctcataaatacactggaaaatattgcatctttgtgcacactttttttcgttcctatgctattataatagacgtaacccccccaatacattatatagtttttgctacaccccataagaaacgaaataccttctcctgaaaagcctggctaccccgccaggcttttcactttgtgagaaagccatggaaaaggtgtaatgttatcaagatttttctggtataatttttcttgtatatttgagaaaattcagatacaataaaggaacaggattgtaattatgagcaaattaggaaaaggatataaaacgtggaagataatttgaagggacgtatcaacagggatgcccttttttcctctgagacagaggattaccgcatgccaatggaaccggacgcagatgacgatgtgctgcttcgcatgcggacagctaagggcaatgtggatcatgtatattatgtggaggataaagccgaggtggagatgaccaaggccaagtccgatgaattgtttgattactatgaatatgaaattacagtaggcaccgatcaggtgctttatcactttaaagtggtgtccgaacaggatgtctgtctttataaccggctgggacccacacaggatggccagccatgctttgatttcaagattaccccgggattccacacgccggaatgggcaaagggtgcggtcatgtaccagatttttgtggaccgtttctgcaatggagatgagagcaatgatgtggaatcatatgagtatgtctatatcggccgtccggtacagaaggttacggaatgggaccggtacccggccgccatggatgtggggtacttttacggaggcgacctgcagggaatctgggataagctggactacatcaagaagctgggagtggaggccatctatctgaatccggtatttgtatccccctccaaccataagtatgactgccaggattacgagcacattgatccccactttaccagaatagagaaggacgggggaggtctggtcaggcctgacgccacggataacaaggaggctgaccggtacgtgcagcgcagcgcaggcaaggagaatctggaagccagcgatgcattctttgcccggtttgtggaggaagtccataagcgggggatgcgggtaattctggacggagtgttcaatcactgcggctcctttaacaaatggctggacgcagagggaatctatgagcattccggcgactatgaggcaggggcctatgagagcaaaagcagcccctatcacagctttttccagttccatgacgacagcgacggggcctggccttacaacaggacctatgacggatggtggggacatgacaccctgcccaagttaaattacgagaattctgaaaaactggtggagtatatactgaacgtggccaggaagtgggtatccccgccctattccattgatggctggcgtctggatgtggctgccgacttgggacacacggcagaatacaatcacgaattctggcgcaggttccgccaggccgtaaaagaggctaatccggaagcgctgattctggcggagcactacggggatcctgcttcctggctggagggagatcagtgggattctatcatgaattacgacgcgttcatggaaccggtcacgtggtttctgactggcatggagaaacacagcgacagttataacgggggcatatggggagatggtgaggctttttttaacgccatgggataccatatgagccgtatgcagaccaacacggtgatgacggccatgaaccagctgtccaaccatgaccattcccgtttcttaaccaggaccaaccagatggtaggccgtatccagacagctggtccggaaaaagcaggacagaatataaagccctgtgtgttcagggaggcagtggtgattcagatgacctggccgggagcccccacgctttactacggcgatgaggccggagtctgcggatggacggatcccgacagcaggcgtacctatccatgggggaaagaggatttagagcttatagagttccaccgctatatgaccggaatccaccgcaagataccagcgatcagaaagggtgcggtaaagccccttctggccggataccagaagattgcctacgggcgtatgtacggcaaatatcaggccgtggtggtcatatccaacagcccggacagccagaccatggacattccggtatggcagctgggcgttactgacgacatggtgttaggcaggcccatcctgaccgctgagacagggtacaatgcaggggtcatgctctaccgcataaagaatggcatgctgaagctgaacatgccgccttacagcgcggcagtattcgtttctcagccggatgaattttatccggtggtggattcgcggttcgcggatgatggggcggctgtggagaagtaggcagaaggatgaaggcagaaggatgatgtaagactgacaaatgttgtaagacaggtggattttgaatctgatataggaaagagcacctttcggaggcggagaattgttccgcgggcggggaggtgctcttttttgatactcagaaggtggtttgttaccagagattcccctcgtcgttaaagggaagctcctggggctggctgataatttctatctggggatttttcccggcgtcctccatcatgctttcagatatccatatctcgccaatctccagtgtattgggaatccgtaccatacggatatgttctaaatccacttcattacatgtcttaatacaggcagccatggcaaaatagtcgtttttaagaatcatgggaagccttacacagtcaaatacagtggaagttatggcattgatgtagcttgcctccagattggatttatccactaaacgctgggtgcaggtatctgcgcagccggctccaatcatgatgccgtggcttttgtccgacaggtccagtacacatactttttgtatggtgaaatcaccggaagcatagggagtggcaaaacgggaagagacattgggatcctggccgtcgccgctgaaattctttccaatctcatctatgaccaataccgcaatgtcatcaaagagaatccgcggcatcagtgagcgggccaataccagcagctccggctctttttcgggaatttcctcgggagtgagcgcctttagcatgtaagtgcggctgtaggcgttctccacgattcccagaccgaataagatggggcagtttgccaggatgacattggcaaacatggggacgagtcgccccatgttcttgaatccggactgatggcacaggctggccccatactgtttgcctagtccaatggtcatcattttcatgagaccgctttcataggaacctctgaaagcagtgtggggcttgattttgttaatcacgataatgccgtcagcctcccacgcgttcttatcaatatgaacatcatggccttcggggctgactccaatccggactgtctccatgccggacttaatagggcagccgagataggcgggggttatcccaaacccctctaaaacttccagctgtccctgggcagtagctcctccatggcttcccatggctggtaccacaaacggatttgccccgtgttctttgacgatatccaccactgttttcagaatcagtttatgattatgtatgccgcggctgcctgctgttatggctatgttcatgcctggcttaagggtggctgctatctccgggcgtgacagttccccgcgtatcccggctgcagggtctgtaatttcggatgggtcgaatttctggcgtacgcgggccatctttggtattttaacgttgccgattacattgtataatgcagaatccatatttcgttatctcctttacctggttatgaaggagggcacagcggttacaaggcttttactgacctgcgtacaaccagctcggcgctgactgacaaggtaatgccattatggtcttcatttgagtttaaggagtcgatgattaaatgacaggcccgctgccccagtaatctggcaggcatgtccatggtggtaagaggcgggttaatgagtccggaataagggatattatcaaatgatatgatggaaagatcatcgggtattcccagtcctttttcctgtaagcgctggatgattccatatgcaatcaggtcattgactgccataatggcagtgtaatcttttcgcttttttgcctccaggaatttgtctgccagcttatggccggcttccatctcatatagtccggaatctgcctcggattcatactggactgtcattacatcatcctcggaaaatgaaaggccgttattagccagggccagtttgtaaccgtccagggtcataatacgtgactgacggttaaacggagtacttaaaaatgcaattgaccggtgcccctgtgaaatcaggtactcggcggcagtgcgtccggctcccagcatatctgtctttgcatttatgaccttgtctgtgtcagagtagttggattcaaatatacacaccttcccgcctgtggatacaaaatggtccacggcctggggggaatcgtctatagatgaaatcatcaaccccttcaccctgttttttataagattgttgatcagattacgctcggtctccggacttctctgtgagctgaataccaatggaaaatagttatttgccatagcctctttctcaatccctataatgagctgtgtgtagaaggggttttggaaggaggggatgataatgcctatggagggattggtatttgtcttcagcatgcgtccaagcaggttgggctcgtatccaagagtgtttgcagcatgcagcacacgttccctcttggcagcactgacaggataagtgctgccgctcaaaacacgggaaacagtagaaacagaagtaccagcagcctttgcaacgtcgccaatggtaacattatggctggtatgattcatacggtgtatctcctttaaaatcagaatatgaaaaagcatatatatttatgataatacttaagtgatagaaaagcaatagaaaaataagaaaataatagaaaaatataataataataaactgtaatacataggaaactaacgtgaaaatgctgtgaaataaggatgaaaataaaaatatttgtagaaatattgacagaaaacgttttctataatataatgagcttacaaaacagaaaacgaatatgagaaagcaaaaagcatacatgcattccaggataactgtggtgcatataaccactataactatattttattaaaaaggaggacgtgtaatatgaggagaagaaacaaaagaatggcaggtctggcactggcggtgatgatggctatgggaagtctggcggcttgcggcgggcagaaggatgccccggccccggcagctccggcggcagctgatacaaaggcggataaagctgaagaaagtaagactgaggatactgccggcgaggcagcaggtgaagccctggaattgtcctggtatgtgggtgagcctgaaagccatgcgtggagccaggtttcctatgatattgcaaaggagatcgaagaaaaaaccaatggctctcttaaaatcaaggtttatcccggggccacgttaggcacgcaggcagaggcgctggatatgctgcgtacaggttctctggcttttgaggtcacgggtccgagtattctggcatccttctgtgaccaggtacaggtttactcgctgccctatgcctttgataacgcaaagcaggcgtatgactactttgcctctgaaggttcccagaagatgtacaatgagacagtccttaatgcaagcggcgtgcgtacattggatgtatggtattacggcgacaggaatctgaccatcaagggcgtggaacccatgaaaccggatgatttggcaggcctttccgtccggtgcatggacacgcctatagccaagacagtggtggctgcactgggcggtaatcctgttcccattaatatgagtgaattatacctttccctccagaccggcgttgtggtaggagaagagaatcctgttccaaccatcattgcccagaagttctatgaagtacaggatgcaattgtgctgacaaagcattccgtccatcttggcacggtggaggtttcggagcagatttggcagagccttacagaagaacagcgtcaggtgattaccgatgtacttgccaagtaccgtcctattatagaagatagaatcaacaaagagacagaagaaggactgggattcctgaaagagcagggaatgaaggtcattgagccggatgtcgaggcattcaaggccaatgcagccaaggtagtggaagagaattttggaagtgatcctgaatgggccgcagccattaaggacctaaatgattttaaggctaactggaaggaataatgaaacctgctgacagagtgaaacaacggaggtaagcatgaagaagctattgaaggtatttaactccctggaggagatcatagcgggctctttatttggcgtcatgtgtattacaatcctgtgccagatgttctcccgtatcttcctgaagaaagcactgctgttttcggaagaaatatcccgcttttgttatatatgggttgtattcctgtgtatttccctgggagaaaagaaatttgaacatttcaatgtcgaggtatttctttcgtttgtcaagggagtaccaaaccagctcctccgggcacttacaagtctgttctgctttggaattcacctttacctgctgtactggtctgttcagttctttgattttcagaaagtggtaaaatccgctgccatggaaattcccatggcggtggtggcggcaggaatggtcctgggttttttcctgggatctgtccggtgcctggtaaatgcggtaaacagtgtccggaagattggagatatgaaaggaaaggaggagtaggagtatatggaaccgattaaagtattttttctggtgtttctgattctgatggtcatgagagcgcccatgtatctgtgccttttggggtcttccctgctctatatttatctgacgccacagctgtccatgatgacggccatgaataagatgatgaatgcacctaattcctttacccttctggctgttcctttttttatctttgcagggcaggttatgaataacggaggtgttacagaccgcatattcggttttgctaaaaagatgattggccattggagcggcggacttgcgtatgtgaacgtgctgtccagtcttatattctccggtatcagcggttctgccctggcagatgtgggcggactgggaatgattgaaattaaagctatgagggatgagaagtatgatgatgacctgacccttggcgtcacaggcgcctccagtaccgtgggcccaatcataccgcccagtattccgttcgttatatatggagcaatggcaaatgtgtcaatcggagccctttttatggccggcctgggtcctggtgtggtcctgtgtatcgtcttatgtatctacatatatatcattgcaaaaaagaggaaatatcccagacacgcaaaggcatccggacgtgaaaaatggaaggcttttctggaagctctgccggccctgatgttcccggccatcatgctgggaggaatatggacgggatggtttactcctactgaatctgctatgttcagcgtactgtatggaaccatcgtatcctgtttcgtatacagggaaatggatatacgaaagcttccgtctctggcagtggccactgtccgccaagtgggcccatccattgctgtggtggtaggtgcctctctctttgcctgggttatgacttacgagcagatagacaaggtggtagtggaactgattctttcggttacgtccaaccgctatgtaatcctgctgctgattaatcttatcctgttgattctgggaatgtttattgaagtagtagcggcaattatgattatgctgcctattcttacacctttaatggccatagccaatatcagccctatccatatgggcgtgattctggtgctgaacatgatgattggactgctgaccccgccggtggggatgtcgctgtatatgctgtcatctgcatccaaacgttcctttggagatgtggtgaagatggtatctccgtggctgattccgctgtttatagccctggctatggtaacatacatcgagcctattaccatgttcctgcccggactgtttggctatgtataatataacagacattttaataaagaataattattatggagggaaaagaaatgaaagcaaaagttggcgttgttggagctggaacctatggcagtgtccttattaacgcatactatggtgcgcacaggagaggggaaattgaatttgcggcaattgcggatatcaaccctgatacgctcaaatctatggatgaaaagtatggaatcaaagggtatacggactatagggaaatgtttgacaaagagggattggatgcagtggcagtggtcactccggattatcttcatgaggaggtggttctggaggcggctaaaaggaagattcatattcttgcccagaaaccgttgtccacggacatcgaacagggtaagaggatgatacaggcagcgaaggaaaataatgtcatgctgtacgtggattttcacaagcgttttgacccggcccatatccagctgcgaaatgccattaaggaaggaaaattgggagagatagaatatggttatgtctgcatggaggacaaaatcctggttccatcagtctggtttaagaactgggcgcagaacagttcgccggcctggttcatcggcatccatttctttgacctgatatactggcttctgggcgagaaaccagtgcgcgtatatgcctccggaatcaagaagaaacttacatccatgggtattgatacatatgattccctgcagtctaagtttgagtttgcaagcggggccagcattacggttgatgcatcctggatccttccaaacagcttttcatctattgtaaaccaacagatccgtctggtaggtacggaaggattccaggaagtggacagccaggacaggggcgtggtggctgcgtataacgcggacagctacagccatgtggtgaatccctatggaaacatgatgatagacgacccggttgcaggaccggtaccttccgggtattgtattgaatccatgctgttcttccttcagctggtgaaccggatgaaggatggaaccgcccttaaagagctggaaggactgtatcccaccggagaagaggcaattgtgtctaccataatgtgccaatatgcacatatgagtgctgagacaggcaggatattagacattgaatactaatatttgcaatgaaaagtatggattaaaggagatgggttgattatgaatataaatatttccagaacatcaggtgagatggcgcagagagcggcggcatgtgctgcacaggcaatcaaccgtaccattgcacagaacggggaggccagaattcttctgtccacgggagagtcccagatagaggcaatcaggtatctgaccgaaatggaggtggagtgggataaggttgtcatgttccatttggatgaatacattaaccttgcggaaacacataaagccagtttccgcaagtatctgaaggaacgctttatacaggttgttaatcccaagaaggcatatcttgttaatggcgagggtaatgtagaggaaaatattgcaattcttacagaagaactggagaaggcccccattgatgttgctttagtgggaatcggagaaaatgcacatattgcatttaatgatccgcctgcggattttgagacagataaagcctatattattgttaatctggaccagacgtgtaagcagcagcaggtaaatgaagggtggtttggttctctggatgaagtaccggcccaggccatatccatgaccgtgcctcagatactgaagagccgtaccattgtcaccattgtacccggtatacgaaagggtgatgccatacagaagacattgtcagcagaaacagtgacaaatctggtgccggccactatcctgaagacacatcctgactggaatctgttcctggatggtgattcggcctccaaggctattcctcaggtataaagaaacaggagaaggccatgaagactgcgattatcaatggaagaatcataacgccccacaggatattgggccaggccagccttgtcatggaagatggggttatagaaggaattgttaagggaagaaagccggaggcagactgttacattgatgcacaagggtcatatgtcagtccgggatttattgatatccatacccatggaggcggcggacatgattttatggatggcagcccggaggcaatcataaaggcatgtatggcccacctggcccacggaaccacatcgatctgcccgactaccctgacgtgtacagatgaggagctgctgaccttttttggctgctaccgtgaagccgggaaacagatggaaaatggcccggagcttctgggaatccatctggaggggccttatttctccctggagcaaagaggagcacaggacccgcaatatataaaggtacctgcaaaggacgactataaaaagctgttggatgcttcagatgatattatccgtatgtcggcggccccggagctggaaggcgcaatggaactggcagacgaactgaaggccagggggatactggcctcgattggtcattcagacgccacctatgctcacgtcatagaggcatgggaaagagggtatacccatgtgacacatttgtattccggcatgtccactatccgcagaattaatgcgtaccggcatctgggagtaatagagagtgcgtacctgatagatgggatgactgtagaaatcatagcagacggcaaacatctgccgccggagctgcttagatttattgtaaagatgaaacccattgaggacatctgtcttgttactgattccatgagaggggctggtatggatgatggcgagcatgtattgctgggaagcctggcacacgggcaggaatgcatcattgatgacggagtagcggtcctgccggaccggagtgcttttgcaggaagcgtctgcacggcagaccggtgtgtacgcaccatgtaccaacaggcagaggtgaggctggaggatgcggtgcgcatgatgacatataatccggcaaagattcttggtatccagggcaggaagggaagcctttctgcggggatggatgcggatgtggtcatattcgatgatgaaatcaggattcagagtgtattggttaagggaaagaaggttgttggataaagtacaagaaaaggccctggaaataaattccagggccttttatacatgcgggtggccggacttgaaccggcacggtatcgctaccgagggattttaagtcccttgtgtctgcctattccaccacacccgcataagtactcacaggtacttttttgcacgtgccacagctgaaaacgaggacctttacgtgcgctgcactgatgtccttaagctatattttaacggcacgctagtgggcgaaggtggattcgaaccaccgaagctattagcagcagatttacagtctgtcccctttggccactcgggaattcgcccagatattgcttgaataagcagtgactataataccacagactacggaaaaaatcaagcattttgtgaagatttgtctgtggtttatcgcagtttatctgcagggtttatctgcagttatctgttatccatgaaggcatctgcgtttcagcagattaggttattatacatcagggcgccggccgcagccacccaaacccaggcagattccgcatcaccccaaacacaagcagcaccccaatcattacatagaaaacacaggcctgaacccgtgtaaggcgtgtgcttccggtccttacataccgcacagccatccatccagccatgaacagtcccgggggcagcagaagaaagatggctgcatttgcctgaaaggcagatgcaaaatccagacggagaagggacaggcacatccggcttacgccgcagcccggacagtacagcccggtaaccgtatgaaacaggcagggaatcaggggacgtcccgccagaatacagataaatgcataaaacaggccggctcccaggagcccgcctgtttttatgcatagtgtccgaatacgtttatgcattagggagatacttgttcagctcattctgaagcagggcataagccacgatgcccagtccgaacaggctgagaagcagatagaccaccggtgcgcttccccttggctctccgtgctggtcatggagcatctcaacggcattgcccatctggtacatccagtacagggcataaatcccgcatgtaatcagtgagaacaggaaaaccagtcctccgcttgtaccctgcctgccggagagcgcgttggtttcgtcgttcagtacgatcatccaatagatgccgtaaattccgcaggtaaccaggctcagcaggatacatactacgatgttgcgctgtttcatacgtatatcctccttggtatgttcatgcaatacagcatagattctatcatagacataactgtttatcaacaaaaagcgttacaatgttcatctttttgtcctctttttacttccttttacacagattatgtcctgggctcaggggaaattgctggcatagtactggcacattgctggcaaaaactcatttttatggacgaatggggccggatatgatatactgactaagataggcgtattctgattttcggatacgaatggaggcagactatgagagataaaggaaggacgcgggggatttttaaggtctacctgcagtggccgctctttttgtcggtccttttaatcgtactgactgctgttgtggcagcggtatctgttaaagccggcattatagtatcggtctttaccattgtctatatagggattgccctgtggctgtatttttcaagaaaaagaggcatactggccgggctcatcgcgttttcgtccgcttatgaccagagcaggcagaacctgctggaagagatgctgatgccctatgcggtgacagacggatccggacatctgttgtggatgaaccgggagtttacggcaatcctggaagaagacaagaattcatataagaacattacagccgtgtttcctgagattacaaaggaaatgctggctaccggcggggaggttgtgagtattcacagcagcctgggagacaggaagttccggattgacttaaaacaggttatggttgacagtcttgacgcggcagtgaccgcaggggggcttgaaggccagggctcatctgttacggccgtctatctgctggatgagacccagacccttaagtacatgcagcagattaatgaccagaagctggtggcgggcctgatttacctggataactatgacgaggccctggaaagcgtggaggaggtccggcgctcccttttgaccgccctcatagaccgtaagataagcaagtatatctccggcatgaacggtattgtaaaaaagattgagaaggacaaatatttcttcgccatcaagcagcagtacatggccaggatacaggaagaacgtttttccatcctggaggatgtaaagacagtgaacataggcaacgacatggcagtgaccttaagtatcggtatcggtatgaacggtgacagctacagccagaattatgaatatgccaggacgtccattgacatggctctgggacggggcggcgaccaggcagtggtcaaggattctgataagattcagtattatggcggcaaggcccagcagatggagaagacaaccagggtgaaggccagggtaaaggcccatgccctcagggagctgatggagaacaaggaccggctccttattatgggacaccgtctggcagacattgattcctttggcgcggcagtgggcatataccgtattgccatgtccatgaacaagaaggccaatatcgtggtcaacgaggtgacttcttcggtgcgtcctatgatggagcgctttacgggaaatgctgaatatcctgaggatatgctgctcacgggtccgaaagcggccgagctggtggaccaggggaccatgctggttatcgtggatgtgaaccggcccagcattacggatgaaccggctcttttggagatggtgaagacggttgtggttttagaccatcacaggaccagcagcgaaatcatagataacgcagtgctttcctatgtggagccgtatgcctcgtctacctgtgagatggtggcggaggtattgcagtatattgcagacggtattaaaatcaaatctgctgaggcggatgccatgtatgccggtattgtcatcgacacccagaactttaccaatcagacgggtgtcaggacatttgaggcagcggcatttttaagaagaagcggagctgacatcaccagagtgcgtaagcttttcagggagaacatgaaggactaccaggcaaaggcggacgcggtcaggaaggcggaggtgtttatggatgcctttgccatcagtgagtgctcggccgaagggctggagagtcccaccatcatcggtgcccaggcggccaacgagcttctggaaatccgcggcatgaaggcttcagtggtgcttacggattataacggagccatttatttcagcgccagatccattgacgaggttaatgtccaggtcatgatggagaagctgggaggcggcggacaccgtaccatagcaggcgcccagatgcagggtgtaaccgtggaagaggcaaaggaacggttaaaagacgtcatccgccagatgatggaggaaggcgaggtatcctgataagggatgcatatagacacagaatcagaaaggaagtatgagacatgcaggtagtattactggaagatgtgaaggcattaggaaaaaaaggtcagattgtgaatgtaaatgacggctatgccagaaattttattctgcccaagaagcttggggtggaagccaattccaagaatctgaatgatttaaagcttaagaaggccaatgacgacaggattgcggcagagcagctggcggcagcaaaggagctgggagctaagctggatgattcctccgtgactctgaccatcaaggcgggagagggcggcagagctttcggctccgtgtcctccaaggaaatcgccaaggccattggggaccagctgggaattgatattgacaagaaaaagattatgctgagcgatcccatcaagtccattggcagcttcgaggtgcctgttaagctccataaggatgtgactgccagactggctgtcaaggtagtggaagcataaaatcatagcgcagacacaggacccgcctcaacaggcgggtctcatagattcagatacaggagacgagtaatatggaagaagccctgattaagcgggtgcttccccacagtctggaggcggaacagtcagtcatcggttccatgctcatggacagggaggcagtgattgccgcatcggagattgtgacgggaagtgatttttaccagcagcagtacggaatcatgtttgacgccatggtagagctgttcaatgaaggcaagcccgtggacctggtaaccctccaggaccgtctgaaggaaaaggatgtgcctcctgaggttagcagcctggattttgtacgggatattgtgaccatggtgcctacgtctgccaatgtaaggtcctatgccaccattgtcggggagaaggcagtgctgcgaaggctgattaaaaccacggaggagattgccaatacctgttacgccggaaaggagcccctggagaacatactggcagacacggagaaatccgtttttaacctgctgcaaaaccgcgggggacaggatttcgtgcccatcaagcaggtggccatcaacgtgctggagaagattgaggatgcctataaaaaccagggaacggtcacgggtataccttccggttttattgacctggattataagctttcaggttttcagccttcggatttcattctgatagcagcccgtccttccatgggtaagacggcctttgtcctgaacgtggtggactatgtggcggtgcgcaagagcctgccctgtatggtgttcagcctggagatgtccaaggagcagctggtgaaccgtatgctttccatggagtccaatgtggattcccagaagctgcgtaccggctccctgacggattctgactgggatgcggtggtggagggtatcggcgtcataggaaattccaagctgataattgatgacacccccggtatatccatatcagagctgcgatccaagtgcaggaagatgaagctggagtatggactcagcgttgtaattatcgactacctgcagctcatgagcggcagcaagaagggcggaggcgataaccgccagcaggagatttccgatatctcccgttccctgaaggctcttgccagggaacttcatgcccctgtcattgccctgtcacagctgtcccgcgcctgtgagaccagacaggaccacaggcccatgctctctgaccttcgtgagtcaggggccattgagcaggatgcggacgtggttatgttcctgtaccgtgatgattattataataaggatacggagcatcccaacgaggcagaggtaatcatagccaaacagcgtaacggccccattggaaccgttacattgatatggaaaccggagtacaccaagtttgtgaatgctgccagacctcagggcggcggacaggacgcataaaaatttttctaggatgtcataatatccattctcaatgcatacactaatagtaaggcaggacatgcctgttaacttgtgaaggagagaatggctatggatgaagtacattatctgatatcggatgcgtccaaaaaggtcgatgtggaggcccatgtattaaggtactgggaagaggagctggaacttgatattccccgtaacgagatggggcaccggtactatacggatttacatatccgcctgttcaagcaggtcaagaacctgaaggagaaggggtatcagctgaaggcaatcaagcatgcgctgaaccaggtcctgaaaaaggacggtaaggcccagggagagctgtccgatgaaatcctggagcgcgacatgagcgcggcgcttaaggaatttaaagaggaagacagcgcaacgtccctcagcactgtgaagggcgatggtgtgtccgtggtcgccatggaagagaagatggaacagtttcagcagatcatgaacctgattattggacgtgccctggaagtgaacaatgaaaaactgagccaggatatcagctgtctggtcaatgagaagatgggcaaggaactggagtttttgttccaggcttcggaccagaaggaggaggaacggttccgccagctggacgagactctcagaagctaccagaagggcggacaggcagaggcggcagcggccaaggttcccttttttaagcggcgcagatttgggcgaagcggaaaaaagctcagggatggaaagtaattgcagatacagcaggagacggcacctgcaccagtggattaacaccatggtgcaggtgtctttttctgttgtttttccatttttttataaacagggaatggttattttatagtactttcaattttcttacgaccttaatttttgtatcgctattccttaagaaatgtgttagaatgaatttgatttgagctttttgacataagaagaagcaggaaggataagttcttcatgaattcaaaatacagaaaatatgttacatatacggcagccgtaggcgtgctgaccctcagctctgtcctgggcggctgtaccaagaaatccacatcagaggtgggggatgccacgccttcagaggtcaatgttatacaggctgtgcctgagaccattgcccagctgggcctgaacgggcaggtgctgccgggactgaacgatattaacctgccggacgcggagccggcacctgagtacctgagaattggggtgcgccatgagatcatcaagagactgcagcagcgtctcatggacctggggttcatggacaatgatgagcccacggattatttcggagagatgacccagcaggcagtcaagcatttccagaggcagaatgagctgcctacagacggtattgtgggcaatgttacctgggatgccattatgtctccggatgccaagtattatgcggtttccaagggaactcagggtgatgatattgagcgcatccagcagcgtctttatgagctgggatacctggcaaccgctgatttggtcacaggcaacttcggtgattccacggaggcagccgtgttaaagctccaggaggtcaatggactggagcaggatggaaaggtgggacagaggaccatcaacctgctgtacagcgatgagattaaacctaatttcctttcttacggtgagaagagcgatgtggtcctggcctgccaggagcgtcttaaggaattgggatatctgaccactaccccggacggggcttacggtgaggacacggtagtggctgtgaagcagttccaggccagaaacgaccaggtggtggacggctatctgggaccatccaccagaattgctttaaacagcccggacgccagggccaatggcctgatgctgggtgagcgcggtgacgcggttaccaaggtgcagcagcttcttaacaaacacggttatctggtttccggcaacgtgaccggatattacggtgaagccacggagaacgctgtcaggaacttccagtcacgcaacggactgacctctgacggtctggtaggcgtccagaccatggccaagctgaccggcgacaatgtaaggcgtccggcggctaattccagcggttccggcaccaccacaagacctaacaattcaggaaacagcggcaatacaggaaataacggcggttccggcaatacgggcaagccttccggcaataccacgccgcctgtgagcataccggcaagcggaggcgcatccgcacttatatcggttgcctcatccaaactcgggtcaccgtatgtatggggagcaaaaggaccgaactcctttgactgttccggtttcatatactggtgtctcaaccaggtgggtgtaaaccagagctacctgacttcttcgggctggaggaatgtgggccgttacacgaagattacaaactttaatgacatccaggccggtgatatcgtggtggtaaggggccatgtaggtatcgcggcaggaggaggcacggtgattgacgcttcttccagtaacggacgggtggtgcacagaagcctgagccagtggtgggccaacaactttatctgtgcatggaggattttctaacaaacataaaggtactggaatatgaaaaggagggcgtttggtgatgcagaccatactggtatgtgatgatgacaagcagattgtggaggccattgatatctatttgacaggagaagggtttaaggtaatcaaagcttatgacggctatgaggccctggagtatctggataaaaatgaagtggatttattgattgtggatgtgatgatgccgggactggacggcatccgcaccaccctgaaggtcagggagaacagcagtatacccatcatcatcctctccgccaagtccgaggatgcagataagattctgggacttaacattggggcagacgattacattacaaagccctttaatcctctggagctggtggccagggtcaagtcccagatgcgccgttatacccagttgggaaacctaaaccagcaggcggacggacagatttataagtgcggcggccttcagattaatgatgacaacaaagaggtgaccgtggatggcgatgccatcaagctgacgcccatcgagtacaatattctgctgctgctggtgaagaatgcgggaaaagtattttccattgatgagatttatgagcagatatggaatgaggaggccattggcgcggataatacagtggccgtgcacatccgccatatccgtgaaaagatagagattaacccaagggagccaaagtacctgaaggtggtatggggcgtaggctataagatagaaaagcagtaggtggttgcatgacagatgaaaagaggaagttcagacggaggaaactgttcctgaccctgttccatattatttttgtgtctatgtccgtattcgggatcagtgccatgtaccttaattccaattacggaaaaggtgtaaagtggatatatgaggatgcatacgaggattctcctcagtttgacaaacagctgacagaggatatcgaccgcatatttacctatgtgggttataaggatatgttcgagaccgacggaaagctggatatgcataaggtcattgtaagggtcagcaatggaccgggggaacagggaacggagtggactctggaccggattgtgcgctatatcaagaccaggggatattatctggatgagaatttccaattggccggatcgcctatttccatggacgatgacgaggaagagataaccgtggatttccagagctataatccggattttgtggatgcggatgcaggagatgctccaaggatgaccatggaggatctggccctcgatatactggtccatctgagtgaatattacaccatatattataattacatagagaacgacaccaacctcaatttccgtatccagtacacaagcaataagggggttacaaaggtatccaccaatgtgccggataagaccatggaagagataatagggaccgggaaatacctctttgtgccgggaaataccatccgcatggagaccaacatggccacggttcctgccaatgcggccacgcttctggagatatggaatccctataaaaacgataagaattacatggtcctgtccgtggacaccagctacccaaatacggatgcgtattccatagaggcaaaggcatataaggaagccagaaacgagtttattctgggcatgggaagcgttatcctgggaggccttggatgtgtggttacactggccatgctgatgcttatgtcaggccacaccacggacggaagcacggaaatacgcctgttccctattgacgagattcacacggaactatgcctgattctctgggcggcggccacagcggtgtttatctacataggaaggtatgtgggtatccggctgttcagcctgtttgctcccaatgaacaatggaattactggaataagatgattaaactggtcattgtgtacgggagcgttgtattgtgcggctttgatttgctgcgcaggtataaggccaggaccttgtggagcaacagcctcgcaaagagggcgttggaagcttcaaaggactatgtgggtagagtcagctatgcagtgggcaccgggttctgctacctgttgtttttaggatttaacgcaggtatgctgtggggactgattttcctctttttctataaggagaacaggataagctaccagattatgttctatgtattcgtggtgctgtacctgggactggatggatggatataccatcagctgtttaaaaaatcggtgcagagggatgtgctggacatggctgtcagcactatctcccagggggataccagctatcagattgatacctcccgcctgtcaggcaaggagcgggacatggcagagcatctcaataatatcagcagcggtctggattcagctattcaggagcaggttaagagcgagcggctgaaggcaagcctgataacaaatgtatcccatgacatcaagactcctcttacgtccattatcaattatgtggaccttctgaaacgggagaaaatacaggatcccaagattgccgcatacctggaagtgctggaccagaagtctcagcgccttaagactctgacagaggacctggtggaggcatccaaggccagttcaggcaatatgaagttagatatatcggatattgacctggtagagctggtacagcagaccaacggtgagtttgaggagcggtttgccatgcgcaggttggagctggtttccaacataccggatgaggtgcttatcattcaggctgacggacgccgcctgtggcgtgtcctggaaaatctctataccaatgcagtgaagtatgcaatggagcacagccgggtctatgtggatgtgctggacgaggacggcaaggccatatttacaatcaagaatgtttccgaatcatcactgaatatcagtccggatgagctgaccgagcgctttgtcaggggagatgtgtccagggccacggagggaagcggtctgggattatccatatccaaggatttgacccagcttcagggcggtgagttccaggtggttatagacggggatctgtttaaggctgttgtgtcattcccggtaaagagagttgagtttaaggcggacaaaacgtctggggaacccggagacatatctcaggattttggcttcgaggaagaaatataattttaggaaaaaaatggaatttgatagaaggattatgataaatatttcacgaacaaattgtaaaatatttgaaaatattgtggaataaatcttgtttattggtcattataaccatgaagattttggaaaaaaggcgccggaagatatcttccggcgcctcctttttccatgtgcaggcggattttactgataatcaaatacgttaatccagctttccagcagttccttttcctcaggacgtttgtaagccagctgggcagctgccacgatggggagccagccctgtacataacgcttttctgtgcccgttttatcacagaacagatccatgtacatatcagctatcttcttatccttcaggctcagaagcagataggttctggctacatcggcacttgcgttgccctgggaagcatgtacccagtcaaccagataccatttgccgtcgtcgcctacgatgatattagatgggcagaaatctccgtggcacagtttggtgtgctttggcatgccgtccagccttgtaagcagctcatagcgcaggttttcatccagctgttcctcggatttaagggcgcggatggtcttttccttcagcttgtttaacagtgggcaggcctgggcaaaaatcaacaggtgtaaatcaaccatctgctccagatactcccctgtcttgtcgggattttcttccatcagctgctgaagggtcttgccctccacaaattccctggtaatagaccatttgccatcaattacagatacccccagaaccttaggaacattcaggacttcaatggtttccacacgtgcgttgcacagggcttcattcaggacctcggcttttgggaagccttcgcagaattccttgatggcagtgcttccgtcacggtaaacggattttgtttcgctactggaaattaattgttttgccataactatactctccttccacacattataaacggtgctgcgacaggtaatccatcgcactgcctttattctactacaacatgactgaaaagtacatacccaatttgataaatttttaacgtacttttaggcattaaaaagtacatatttcttaataacatttcttaaaaacggaagattgcagttccgtatccaggaagaggataggagaaggaatagggctgtccgtcgcattcgcttttagaggatgagaaacagggagcttctgctgccttataagctccgtggttatccaggagcagggtgtacctgccgcgctttgggacacctacacggtaatcgggtctctccaccggagtaaagtttataatgaacatcaggtttttcttacctgtctcatcccggcggatgaagctgaagatacttctgtcgccgtcattggcattaatccactggaaaccattccagtcattgtcctggcggtaaagggaaggatactttttgtacagatggagcaggtcctttacatagttctgaagctccctgtggtcatcctcgtctgtgaggtaccagtccagggaaaccttttcatcccattcatggagctggccgaaatcctgtcccatgaacaggagcttcttgccgggatggcccatcatgaaggtgtaaccggccttcagattggagaacttgtccctgcccaggccgggcatcttgttaatcatggagcatttcaggtgaaccacctcatcgtgggaaagaaccaggatatagttctcacttgtaaagtaggtaagtccgaaggtcatgcggtgatggttatatttgcggaaataggggtctagcttcatgtactccaggaagtcatgcatccatcccatgttccacttgaaggtaaagcccagcccgtcctgttcgggatgctccgtcacctttggccacgcggtggattcctcggcaatgacaagagcaccgtggttgcgcccctggactactgtgttcaggtgcttaaagaactcgatggcttccaggttctggttgcctccgtctttgttggggacccactggccttcctggcgtccgtagtccaggtacagcatggatgccaccgcgtccaccctgaggccgtccacgtggtactgttccacccagtagagcgcattgctgatgaggaagtccttgacctcatttttaccgtaatcaaataccttggtgccccagtccggatgttcgcccttcctggggtccgcatattcaaaaaggggttctccgtcaaagtcagccaggccatgggcatccttgggaaagtgggccggaacccagtccagtatgacacctatgccgtttttatgcaggtagtttacgaaatacatgaactgttccggtgtgccatagcgggaggtgggggcaaagtatcccgtcacctgatatccccaggaaccgtcaaatggatgttctgcaatgcccatcagctccacatgggtatagcccatctcttttacataagctgccagctcatgggctgcctctgtgtatgtataaaagccatccttttcaggcctgtcccgtttacgccaggaacccagatgcacttcgtaaatgctcatgggcagcttctgtacatctgcctgggtcctcttttcgatccaagagctgtcagtccaggaaaagccctggatatcggctgtgacagaggctgtacccggacggtattccgcgctgaaggcaaagggatctgccttgtagagaatcttgccggactgggtggtaatggcgaatttatagagctctcccagcttcatgcccggattgaaaatctcccagataccggattcggagatacgttccatggggctggcctccggattccagttgttaaaatcgcctaccagatggacctcttttgcgtggggggcccagacggcgaagtagataccttcctttcccttgtatgtcttgggatgtgcccctaatttctggtaaatatcatagtgtgtgcctgccccgaacagatagcagtccaggtcagatatgaaacctgtggcagaagcctttttctttgaagatgctgcagtgcgttttttagctaccatatcagttctctcccttgagtttcaggacagctccccagttgccctttagttttatgtggaccttcccgtctgaaatggggaggcggtctgcgggttccagaagattgactgcctcgccggcctgaagcggaacagggatggccagttcggccggttcatcgtcattgtttaccgcggtgatgatgacagagtcctcaccgtgcctggcaaatgcatactggcggttggtcagcagcagttcctggtaacggcccgtgtgaagcggctcctgttggctgtgaatctgtcccagctgtgcaatcaggtctgtaagttcgcagtgaagttcaccttcctgctctatggagatggcgggacgcagcgcttcatcgctggtgttggtgcgttttccctcaacgccccattcaccgccgtaataggtggatggaattccgggcagtgtgaagaggcagatgtatatggggaacaggtgctccctgagcttaagctttgtggcaatcctatcctcgtcatgattgtccacaaaggtgtaaagctggcgtccgatggcctccagccgtcttacgttgtgggcaatctcaaagaagttgtggtcattgaagccggagtaaaggctcttgtgaagttcataattagtgacggagtgaagcatctcattgttaacccagcggctgtagtccccgtgtatcacctcacccataagccagaaatcttccttcatggcttctgtctggctgcgcatttccttcatgaagttaaagtccagcacattggcgcagtccaggcgtattccgtcaatgtcaaactcgtcaatccaaaaccggatgacatcaaagagataggacctcacatccgggttaaagaggttcaggcagggcagttcaaagtgtccctgccaggcttcatatccaaaggaatcgccgcaggggctctgccagtcgaagttcactcccttataccagtccttataaggggaatcccagcgcttttcctgtatgtccttaaaggcaaaaaactcacgtcctgtgtgattgaacacaccgtccacaacaacctttatgccctcctggtggcattggtccacaaattttctgaaagaaccgttatcgcccagacgccggtccaccagtttataatccctggtatcgtatccatggctggtggattcaaaaagcgggcctatgtagatggcgtttgcgcccagggaccggatgtgggaaatccacttgtctaattcttcaaaacggttggttacttcggttgcatcattgtgtttgggggctccagtcatccccaggggatacatgtgatagaacactccccgctcataccaggtgctcatgttgttttcctcgcaatctttatgtagtcatatgttacagtgcccggagggggatagtactgtaagtactaatcctcctggcttttaaatttacgcagcaggaactggtagcgcagctgtgccgcgttcagttcgtagatatagcagtctatcagggtagggtccacggcctgctcaaagtggttcctggcggcttcgatggcacattttgtgcgttcgatttccacgcgcaggcggatgagttcaggtctggggcgccgcgccctggtcacagcggacctggcggcagcagtctccctgactgctttcatgatgtcaaacatatgcttcatctcccagatattgatagaaatagtatatctggaaaatggcatcttatgcatgtgggccggcagaattaaattttaatgctgactgtcagtacaggaattcttccagtctgtatcccagctccatcagccggcggttggattccctcagggtaagataataatagttggccgtgccttcctggcgtacgcccacaatacccgcatcctttaatattttaaggtgatgggatatggctggacgggaaaggctggtccgccgggtaatttcatttacattgaggccgtattgctcgaaatggatggggccgggcgtctgccttctgtcaagggcttcctctgtcagtacctctatgatggacagacgcatctcatcgcccagggcaatgaacagcggcatacaggcatgaaaacgtttctgcagttcctgggcagttgtcatctgccatttcctcctttggtttaaaaatttgaaccaatttcattttaccatgtatagagaggaaggtcaaggaaatcgggtgtgaaatgcataaaattcacccttgacatctgctggaaaatccttcataataaaacaacattcaacacagtctattttatgacagtctgatttatctcaatggtattatttacgtcaatggttttgtattgtctggctcaggcagaaatttcctcagaaaaaagtgacagatggaacggagagagggggtagtgtattcagtttacatagttttatgtcgtatgccttgtacggcatcatgtcttattgtgcctttatggatatcaggcgttaccggatacctaacagggccctggcggcggcagctgctgcagggctggctgtttcggtggaggcctgggtgtccggagccgggaatattgggttatgggcggcaggcataggcttttggatgcaggatactggtttttgggcggctgcagctgagggcgctgctgtatttataatgcggctgatgttggcggccgccgccggtttcccatttttcctgctgcggatggtgggggccggggatattaaatttatggcccttgtggcaggctgttttggcctggagagaggattttggtccgttgtgattggtttgtgtctgggagctgttctggctctcggaaagatgctgcgagagggcagcatatgtcagagattcttgtatttaactgcctatatcaggcgtttgattcagagtaaagaaattgaggcgtactactgcccggagcgggatggatataagtgcgtaattccattgggagcctgtttttttgcggggactcttatttcagtgttgtggaagggatgagtgatgggtgttaaggtgcgtatgcgccaggaagaaacgaggtgagaagtgaatatatggtaaagattctggcggtctatgacgctgatcccgcctttggggaacggctggcggattatgtgaatcagaaggaaaagattccatttacagccatggcattttccagcctggacaggcttatagaatatggggaagagcatcccatagaaatcctgctggtagatgagagttcacgggcgctggtgggagatgtgaaggcagagcaggtcatggtgctgtgtgacggggagctggtggatgggccggatatatttccggccatctacaagtaccagtccggggattgtatcatgcgtgaggtgctggcttcctactgcagccggccagtggagccggcgctggcccttctggggtccagggccctggtagtaggaatatattcccctgtgaaccggtgctttaagtcctcgctggccctgaccatagggcaggtgatggcgaaaaaggagtcggtgctgtatctgaatctggaggaatattcaggatttaccaggctgattgacagtgagtacaaggccgatttatcagatgttctgtatctgtacaggcagggagggtatagctggatgaagctaaagtccatgatcagcaactgggggaatatggattttatacctccggtgaggtatgcggaggatttaagccaggtggcgccggaggatatggcgcagctcatagacaggattgcgagggagagcggctatgacaggctggtggtggacgtgggccagatgggaaggggggctcttcccgttctatccatgtgtaatgtggtgtatatgccggtcagggaggactatatctcagccgccaagatagaggagtttgaggagtacctggaggaagcagacgatgccggggtcagggacagaatccagaaactgagactgcccaggcatacaggtattgcgaaacaggaagggtatctggaacagctgatatggggggagatgggggattttgtgcggcagcttttaaacggaaagcagccggagagataaggaatggagggaggaggagtgagaagggagagtcaggaataaagaacagggaaaggaaaaagaaggaaaattgagctatggaagagagggagagtaaaaggaggagccgtgaaggtgtgcggtggctcataagggagcgcattatggaggaactgcaggaaaggcaccatatggacgacggagaactgctggaaatgattgacaggtccataggcgagatggggcaggaaatatttctgcccttaaaggaacggctctggctgcgcggcagcctctttgacagcttccgtcgtctggatatcctgcaggagcttattgacgacagctccgtgtcggaaatcatggtgaatggagcaggaaagatatttatggagagaaacggaagaatggaattatgggacaggaattttgagaggccggaacagctggaggatatcatacagcagattgtaagcagggtcaaccgtgtggtgaatgtgtcctctcctatggtggatgccaggctggaagatggttccagggtccatgtggttctgccgcctgtggctcttgatggtcctgttgttactataaggaaattccctgacccgattaccatggaaaagctgattcgttttaaagctataagtacagaggcagccggctttctggagcagctggtggaggatggatgcaatatgtttatcagcggagggacaaactccggaaaaaccacattcctgaatgcattgtcatccttcataccctccggtgagcgtgtaataaccattgaggattctgctgaattgcagataacacaggttccaaatcttgtgcgtctggagacaagaaacgccaatacggagggagaaggggaaattaccatgagccagctgattaaggcggctctgcgcatgaaccccaatcgcattgtagtgggggaagtgagggggaaggaggctttggacatgctccaggccatgaacacaggccatcccggaagtctttccacaggtcatgggaacagcccgcgggacatgataagcagactggaaaccatggtgctgatggcggcggaccttccgctggcagcaatcaggagccagattgtgtcggccctggacatcatggtccatctgggccggctgaaggatgggaaaagaagagttttatccattatgagaataggaggtttgcagaatggagaggtggagctggaaccattgtttgaatacgacggtaaggaggaccggctttgtcagaaagggggaaggacacaggcgggacctggttaggcaggaaattgccaggaggaaaccggaaaagaaggttcccagggccaggcctcccgaccgggtggattacagtacctacagacttactgccggagagtggctgttatacggagctctgggggtgggagcctgtgggctggcatcctatgtcttttaccgcagtgtggtggtgttcctgattctgatgcctgttggagcctgttatcctttatacaggagatcgaatttgaagaaggagagggcccggcggctggaactgcagttcaaggagggaattcaggttctgtcctccttcctgagcgcagggtattcattggaaaacggacttacccttagcataaaggagctggaaatactgtttggaaggagggagatgattacagaagaattccggatcctctccgatggaatccggatgaaccgtccggcagaggagctgtttatggattttggccggcgcagcggagtggaggatgtggacaattttgcccaggtcctgtcagcggctaaacgaagcggaggcgagctggtggaaatcatccggcagacagcgggaattatcagggacaaggtacaggtcaaggaggagatacacaccatgcttgcctccaggattttcgaacagagaattatgaatctgataccgttcttgattgtgctctacattgaccttacatcccctggttttttcagcgtgatgtacggtacctggatgggccggagtgtgatgaccatgtgtctggcggcctatgcgggtgcgctggttctggccggtaagatactggacattgaggtgtgaaaggcaggtgaggcggacgataaaggtgagaaaaagaccggcagagaggcttcatgcctggatgggccggaagcagatcctttgtcttatggctggccttttcataggaatggcggctcagttgtggcagcgtacagacagtgcgcttttggaaggagataccctggccaggggaaattatgggcagggggatcagacatacaacctgatagtggaggggcttggggagaaggaggttcctgtggaaatggtcctgtcagaaaggatgtatacaaaacaggaggcacataagacttatgaggctgtgatggtccagcttccgcagctcatacttgggaataatccgtctcttgaggatgtaaggcaggatctgaacctgcttacatatctggacagctatggaataaggctcaggtgggaatcggatgagccggagcttttggattccttcggtgaactgcatgtgcaggagctgaaacagagggggataggcgaacagggaatcaaaatcagcctgcatgtgcgcatgacagagggaaactggccggaggagtatgaactgtctgtgtgcgtaaagccgccggtgcttacgcaacaggaacagacggaggaagcatttgtggaatttcttaagagccaggatgaattgcagtcctacactgcttatatgaagcttccggaggaatatcagggtcagagcctgaaatacagcctgccggaggagtctgtgtttgttcctgtgatgggattgggggtggcaggagctgtattatgttttttcggggaccaggccaggcagcaaaacaggacagaggagagaaaacgccagctggcgctggattaccctgaggtattgtccaggctgaccatttttctcggcgcaggcatgagtatccgcacagcctgggataagattgccctggaatacaaaatgatggtggagcagggaaggcgcaggaaacggtatgtatatgaagaaatgtatgaaaccagctgtcagatgaaggggggagtgccggagggcaaggcatttgaggagtttggacggcggtgcgggcttcagtcttatatgaaactgggaggtctgctggagcagaaccgtaaaaatggttcaaagaatctcaggaatctgctgcgtacagagatgacagatgcatttgaacagagaaaacaccaggccaggcgcctgggagaggaagcagggacaaaactgctgcttcctctgttcattctcttgtccgtggtcatggtcatgatcgctgttccggcactgatggaattcaaataaaatataaggaggagcgtaatgaagttaggaaaggaaatcagggagttctggaaggacgaacagggggtgggagtgattgagctggtgttggtattggtggttcttataggcttggtcattatctttaaaaagcagataaccaccttactccaaaatatttttaaggagataaacagccagtcaaaagaggtgtattaatgtgcaggaaaggtgagattacggtatttctggcaatgatactgttcagtgtctgcgcactgctgtgtgtgattgtggaatcggcccgcacagcaggcgccagatgctatctgcggatggctgtggattcatccgcagactcccttatggcccagtatcaccgggaactgtggaataagtaccggatattggggcttgagtatgacaaggcagagacactggagaaggagttcagggaatttatgaggccctatatggaggctgaaaattggtatcccatgaaggcggagcagattcggataacagatatgacagatcttacccagggggacggaagatattttgaacaggaaatactggattatatgaagtatggtctgttggatgcagattgggacgagctggatgaagccggcgcatcagagctgttggaggcctggaaagagggaaacagtgttaaccgtgtttcagaactatatgccgcccattccagggaagctgtaaaggtggaaaaggcgctggagataatcaacagtacacttctggcccagagggaacggtgggaacaggggaagggctgcctggaccagctggatgggggaggatttgtatcccaggccaataaattgatacgggagctggaacggcttccgggccaggtaaactcctatgaaaagcgggctgatgaattgtatgagaaattggcagacagcagagaacgttttttggaagaagccagtgacctgagtgaggatgtgagggctggcctggaggaggaaatcagccagtatgaggcatatgcggcccaggatggacagcgccgcagggaggttgaggcgctgacaaatctgagccgggacaggatactgtggattagggatgtgattgatatggcggaggcggtaatggagtatatcagcagctgggagccggaggatgaggacgatgagctggacgaggatgccttatggcagccggtaagggcgcgctggtcccagtacggcatgcttacactgggagtggaattcggggtccgggataaggaaaaggaaggttttctggaacaagtaggaaatatggcaggaagagaaatgctggaattagtattaccggagggaaccgttgtttctgggacagccctcaggctttccggcacaccgtccgtccagaggaaaacagacggcggtggatggaaggaaacagaccaggatggagattctaagagcaccggctttttgaccggagtcaggacactgatacagcgcctgttgattggagaatatgatattcgtttttttaaagggtttaaaaaagagatgcagaagggggaattttatgagctagaatatatcattcatggaaaggaaaaggacagggacaatttaagcggtgtggcggcgcgcctggttgcatttagagagggactcaatctggtacatattctgtcagatgccggaaaacgccaggaagcgcggaatctggctctgaccattgtgggagggaccgggattttgccacttgtatcagtggtggcattttttatcatggcagtatgggctctgggagaggctctgctggatgtgcggtgccttctggaagggaaaagggtaccggtctttaagactggatccgactggaaactggatttggccggacttttggagatgggaaggagcggaagcctgattgatgaagaaggaggaaatggaagcggagctgattataagggctatctgcggatacttatattcggcgcttatgacacggatctggtttaccggatgatggatgtaatgcagattgtcactgcggtgaagcagcctggattttctttggcaaactgtgtatgtacggtggatgcagaagctcttgtcagtggaaaacatgtgtttttttcaaatggattgtggaaaagccggggacgggaagacggttacgcatatgacacgcgtatggctgtagccgggagctacctggaagactacaaaagcccataaagaagggaactgtaaatttttaggaatggggaaaggaggttcatgatgatgcccttttttctggtgcagaataaaaaatcaaatccgtattgtccatataaaaaaacagcaaaaataaatacaaccgcacctctccaagtacgtaaatgctgtcgactgttccatggaaaaagggcattatcatggaactcctgccagatgcaggggagtctctccgtagaggctgctctcagtctgtccctgttcctgttcttttgtttctgtctgattatgcctatgaagatgctggaccgtcagagacagatacaggctgtaatggaatccgtgggggaggagctgagtcagtatgcctatgtggaatactgtttccgtagcgcagaggaaggaggtgcagaggtggatgtgggaagagcagaggatacagccacctctgttttggcagcagcttatgcttccgccagaatattgggagagattaacagggagtgggtggaagccgtatcatttgaggggacggacataggggaggatgagatggtccatatcgtgatgagatataggatgcgtcttcccttttccgtattaggagtcagcagcattcccgtggaacaggtatgcagccgcagaatgtggaatggagcagatgggggacgttttggggatggtgacagggatgggaatggagaagaagatgagatagtatacattggaaaaaactccacccgctatcaccgcttaaggacctgccactatctgtacaatgatttaaaggcagtggatttaggggctgtgggggaactgcggaatgaggcaggaggaaggtattcttcctgtgggacatgcggtgggagaagcggaggcacaggaagcgggggcacgggaagcggcagtatggggagcagcggtacggtttatgtcatgccatatggttcaagctaccatgtgtctaaaagctgccggtccatcattgcgtatgttcaggcggttccattgacgcaggtggaatatctgggggagtgttcttattgcagaggaaagtgatgtgggagacgggggtgttatttgttgggcatattaaatggggatttgacggaacaattaacagcaggacatgacatagccggagtattgctgcgctgcggatttcttatgacgctgtcaattggagcctggcaggatatgaggaatcacagaataaaactcagcctgattgtgatgtccgcagccgcgggcgcggttctgcgatgcatgtatattgtgctggatgcggcaatcatataccgggattcgggacaccagataccttcggacttggtgtcgggccagattatagatacagccatggccatggctgtaggagcgggattgctgtttttatcccggataacaaacgaggctgtgggaaagggggatggatggttttttctgatatcgggcatttatctgggtgcattgaaaaatctggttttgctggcaggcggcttggggatttgctttttactatctatggttttagtatttaaagggattatacagggaacagacagggggaggctgcgcattcctcttcttccatttctgatcccggcaggaatcggggtgatgttcctatgagggaaaaaacgcttaagggaagtcttacggttgaggccgcatggattatggccatggtattactgtccatagcggtgatgctccagcaggcatgccgtattcatgatgagaccaaggccgccatgggtctgcatgaggcgttggaaaagggccgtcatggaagtgcaaaggagctggaagcctctgcgtccggggcgcaggaacatttaggccgtctcatgttctttcctgactgcgatctggctataaaggaaaaagggaagaggatatacggagaaggcagagggggaaaatggaaaagagagattgaggcgggaaggttccggccggagacatttctgcgcaagattactttaattgaagggctggttaaagaagatggaaattagctacaggagagaagcaaaacgcaattacctggtagcgggggtggcagaggccacagctggatatgaagccagaatgctggcccacaacgagattcgtggactgttaaggatgtacataacataccaggatggactgcccttatattgttatgacattacctccagacaaccgttaagccgccttctggaaacccgttttataaccagagaagagatatgccagttattaatccagatacatgcagcgctaagtggtatggaggaatatcttttagatgcagggggtgtcctgctggaaccggaatatatttatgtggagccggaattattccagaccggtttgtgcctgatccctggtgttcaggatgatttccagggtaaactgagccgcctcctgcaatatatactgaagaggataaatcataaagacagggagagcgtagtcctggcttatggactttatcaggagagccttaaggaaaactgcggaatggatgatttgctggggctgattgcgtcagaacggcggaaagggaagaaacatgagttattgagcgaaccggagggagattatataaagaagggaggactacaggaaacagatcattgggagaaggggctgaaggagaagggacaagggaaggaacaagggaaggaacaggggactgagcaaaatagagattgtattacagggaaggggaaaggaaaaagcggggagacagagaaacagcataacagtgacaggggggagaagcggagaaaaaaagaaaagggtaaattggaaaggcgtgaaataaaacaggaaggctcaggccggactgaacctgaatggaaaggaaccactttcagacggcagtttatcgtatggctgtcagcggcagtactttgtccatccgcactgtggatgttcagagggatgacaatggtcattgacaactggaggctgctggcagcaatcgacggaggcttgctgtttatgctgtcagccatgaatctgtataggctgttcattgggcatagggctgcaaaggcagatggggcagcttcagatgatgagcaggacccatggagaattttgtatgaggatgaagatgacgaagacgaggatttaggtaatcagccatccactgcgtatatgaatggggataaaaatgagtatttgcagaaaatgccggaaagcagcgccggagagtgctttcagaccgtgcttttatcagagcggccagcacaaggggaggaagtccggcgtttatctgccctcaatggttcggatgaggacattgtaatatcctattatccatttgtgattggcaaacacaaggatttagcagactatgtgcttttgaaagatacagtcagccgttttcacataagattagacgaggacaatgggagttatactgtaacggaccttaactctaccaatggtaccagggtcaaaggacgattgctggaggcaaacgagacaacgcagctggagccgggagaccagatatttatagctgactgcggatatattttttattaacagcacagagtaacccagtatgtttcgtttatcttaaaagacaattgtgtgagtgtggttgcagaaatagtaaataacaatggggtgggggcataaaaaataactttattgcgtcaaagccacttaacaagtcctttaaagtatgctaagattatatatcattgaggatgtgaggaatacggatggttacgggcataaacaggagcaggccatatgtcaacattgcgctggcagcagtcaacgtattggtatttctgtacctggaggccatcggctccacggaggatggcgtattcatggtaaaacacggggctgtatttgcgccttttgttatccttggtggagagtattacaggctgtttactgccatgttcctgcactttggagtcagccatctggcaaataatatgctggtgcttctggtgcttggagagaagatggaaagggcgctgggtcatatcaagtatttgatattttaccttgccagcggtgttgctgccaacagtatatccctggctgtccaggtacggacagggcaggccagtgtgtccgcgggggcttcaggcgcaatcttcggtgtggtaggcggtctggtctatgtgattgccattcatcatggtcagttggacggactaaccaacaggcagctgggctttatggttctgctgacgctttatcatgggtttacttcagcaggagtggacaatatggctcacatagggggcctgatttccggcttcatattaggtatcctgctttacaggagaaaagatgctgccagaatttccggtatggctggatagaatgcaggctgtgttaaccgcagcggaaggaggattttcagaatgacagatgacaattgtattttttgtaaaatagcaggaggggtgattccgtcaaccactctgtatgaggatgaggattttcgcgtgattctggatttgggaccagcgtccagaggacatgcccttatccttccaaaacagcattttgcagatgtatgcgcactggatggggatatagccgccaaggtacttcctctgggtgccaagattggctctgcgatgaagaaatctcttggatgcgcgggattcaatctggttcagaataatggagaagcagccgggcagactgttttccatttccacatgcatgtgattccaagatatgagggaggtccagacatggtcagctggactccgggaaaggcttcgccggaggaattggcagaggttgcggataaaatcaaaggctgtctgtagttgcaatgaagattgagaagatggatacagaagataaaaaactgtttgaagaaatgtatctggaatatgaggtatacctgagaaggatagcttatgtcaacgatattcctgtagattatattgaggatgtggtacaggatacatttgtttcatatgcccgctataaatattccctggatatgtctgaggaaagtaagagggcgttgctgatacgtattctgaagagccggtgtatggactttcaccgaagaatgaagtacaggagctatggggaattggacgaagaggcatataacagtgaagattatccggcacacgataaggctgccaatctgccggattatgtagtcagcaaagagagatgtcaggcgcttcttaaggaaatcgagaggatgcctgaaaactggcgtcaggtcgcgacgctcagattgatagaaggacggccgacaagggaagtatgcgctatgctgaatattacagaaaaggcatgctattccagagtcagccgtatcaggaaatatcttgaggaactgctaaaaagtgataattggccctaacgttattttacacatgattcaatgagagatacaactgttttaacagcattgttcagattgctctgctccatggcctgtatataggaattgcggtttacgtataaatcgttaatggcatcaaacagggagtcatcagacaatacttcttcttccagaactttgctgaatccttgttttgcaaaggagttagcattgagaatctggtctccgcggctggccgcggctgacagaggaataagcaggttcggtttgcgcagtgccaggagctcgcagatggaattagcccctgcccttgatatgacaaggtcggctgccgcaaaaagatgctttaagggagcgtcaacgtattcatactgtacatatccggctgttcctatcaggctttcgtccagattgcctttgccacagatatgtattacctgatagctggacagaagcctggggaggatattacggaccgctgtatttacggctacagagcccaaacttccgcctatgacaaggagtacaggcctgccggcagacaggtgggcatacgatagcccggacagccggtcaccctggagcagctctgcacggataggggagcctgtcagtacagccttgtcggatggaaggtacttaagggtctccgggaagttacagcaaaccttaagggcggaaggaatgcagattttattggccaggccaggcgtcatatcggattcgtgtatgatgacagggattttgtagtgtttggcagcaaggaccacgggaactgcaacaaaaccgcccttagaaaagattacatccggtttatggcgttttaagagccatctggcttccgcgtaacccttgacgacgcggaatgggtcggaaaaattcttgatatcaaagtatctgcgcagcttgccagaggatatgccatcatagggaatgcctgcagtttcaatcagcttgcgttccatgccctggtatgaaccgatatagcggatttcgtaaccagcttcctttaacgaagggagcagggccagattgggggtaacgtgtccggcagtaccgccgccggttaaaataatttttttcataaaaacctcctaaagtatatgatatgcgggggaaaccggcattcataaacgtctactattatagtaagcattaaacgcaaaaagtcaaccctaaaggcaaagggaactttaggagatttggtaaacagaggtgtcacgtgggagattataaaagagattcagaacaggacaattctatggactgccccatttggggaacggacgatatatcagatgaagaactgttaaaagaattagaagcagtcaagaatatggccgtcccccttcccattccatccccatccccagatgaatttgagaaaatctgggcaaggatacaggaagaaagagctgagtcaaagaatgtaccggaatccgaccaaccggagcaccccaaggttatcaaaccaaggttcggatggaaacggttggctgcggttggtttaattgcctgtcttgtggcagggagtggatgtatggtggctatggggacaaagtcgtatttttatcgggagaaggagttgggggatggacaacaaacagtatttgttaatgatttttataaaggtgatgtgaatggtgaggaagaggcttataatcttatagaaaaagagttggggattcagccattaaagttgggatacattccatccgatatgtactttttagatgtatatataaaagatgggtatgcaaggctctgctttacttataatgatgagtttgtttattttatccaatctaagtttaataagaaggtatcatatgattataaatctgatagagaagaaatcatatcagtaaaaaataagtggttaaataaggatattgatataaagatagcaacattagaagatggttcctctagaaacgaaatatcttttgttgatgatggaaaatactatcgtttatggggaccgattgaaatacaagaatttaaggaaattgttgagaggttgacatattgacaaaagagggagagtaagtaatgagaagactttttaaggtgctaattagtacaattctagtaatgaatatggtagttatgacggcaatggcagcaccgtataatcctgataagtttacatcagtgaacattgagtcggagttgttagcgccacaaataagaagtagtagagtgacagaattaccaaaaccaaggggagtctttttttccgctgcggatttaataatatctgatgaaggaaatggtgatgttggagtttttgcaaaagcatatatggaggttccggttgatgaagcttatattacagtatatttggatcagtgggatgaagatgcggaaagatggcgtcaagtaactttttatgatgcagaattttatttaaaggattacccaaatggaattaccgaaccagaagttaatatgatttttaagaatcagcctaagggatattattatcgtcttaggggggtatttggagcagtccttgatggacgttttgaaggatttagcccaacgacagcaggtatcttagttaaatgatggggagcttgtaataattatataaagttctatatattaaacctataaaattgagagctctttgtgactaagaagtgataaaatctcttagtgacagagagctcgttttataccatataattctgtttttatattaccgccccttaaactgcttcaacgcccgagccaactgatccggacaagacgtaggtctgggaccgcactggattccgtccagtcttcggatggcctcatctacgtccatgccctcgatgagccgggacaggccctgggtgttgccggagcagccgcctacaaactggacattggtcagtttattatcttttacttcaaaggatatctccctggaacagaccccttgtgttttaaatctcatgtgtagtgcctcctgtgataaattcgtgtatatccgattatgccttatgcaaaagataatgtcaagtgagaacaagctttgaacttgaaaatctgcaggcttcctatataatagaagaatagtacaagacagaaggaggtaattatgctaggaattattggagccatggatgaggaagtggctatgattaaggcgcagttgacagatgtacaggtggagacaagggctgccatggacttttataaaggaaagctggaggggaaagaggtagtggtggtccgttccggaatcggtaaggtcaatgcagctatgtgtacccagattctggcagatatatatggtgtaacaggtgtggtaaatacaggaatagcaggttccctgaaggcagagattgatattggggacattgtgctttccagcgatgcagttcagcatgatatggatgcaaccggatttggctatgaaccgggacagatacccagggtggagaccctggcttttaaggcagatgaaggtcttatacatcttgcggaggaatgttgttccaaagtcaatccggacatccataccttcgtaggacgagtggtgactggagaccagttcatttctgataagggaaaaaagaagtggctgacagatacctttggaggatactgtacagaaatggaaggggcagccattgcccaggcttgctacctcaattccatcccattcctcattgtgagggcgatttctgataaggcagatgacagtgccacagtagattaccctgcttttgaggctaaggcaattattcacagcgttaatctgcttactgagattgtacgctctatttgattcagataactgttgattgatagccagatttatattatttgtattcatgaataacagccttatagatggcatagatgacatgtttataaatagaatgtttataaatagaactcttataaatggtacacttacaaacagcagactcataaacaatacacgcatgactcattaataatcggacctctggatgtgacaagattcagaggtctgttttataagagagggggatggtatggaaaagaaaaagaagtggatgatatttgggggaacggcggttgttgttgtgggagtatttctttgcattgcagcttttttcctatataaaggggtgactctcttttttgatagggaaatagttgcagaccagtatctggaacagatgacgtcggcagcatcccagggggacagagatgccatgcgttctctgtatatgccaggagcggtaccggaagaacatatggaaaggcaaatacaggaaaatgtggatatatggggcgaaagtcagttagattcttttaaaaagaaggggttaaatatccggaccagtactaaaaacggtgtaaaaactaaatctgtggagtgcagctacggaataaaaacagaggatgggcagcggtttacggcaatccttaatagaatggaatcgtcagatggaaaccagggaatcatcagttttatcattagggacaatgtatccttagctccacagggaacgctgcgctccatcagtcattggaatgtatttcaatggggattgttcctgttgtcacttatcatgattttctctaccattgcgactgctgtcatatgttacagacagaatccgagatataaatggggatggattatattgatattaatagcctatctgtctatgggtttttccgttattcgtacaccaaacacgtgggaatttaaggtcaactggtcggcagccacagtccggctcagccagtatgttacatatgagaatggcagcagggtgttccggctgttccttccggccggtatggcagtgtactggatcatgaaaaaacggctggaccgggaatctgttcataagaagtatggagaccgggaagctgccacaaagaagcatggaaactgggaatctggccaggagaagcgtggtaaccgggaatctgttcataggaagcatgaaaaccaggaaaccggccctgagaatcgtgcagaccaggaaaccggtcctgagaatcgtgcagaccgggaaaacgacccgaagaagcgtgcagaccgggaaaacggccaggagaagcgctcaggccaggaacccggcccgaagaagcgtgcagaccaggaacccggcccgaagaagcgtgcagaccgggaaacccgccaggaacagcgtccggatacagacagagaatcctggcgtataccttaactgtctaaagaaaaatcttacctctcagaatcgttttttaggagaatttggcgaacgattctagggactctcaacttcccaaatcaaaatccgttgctataatagattttaccgggaaacgcctgactgcaggggcgcttcccaaaccaggcagcggctgcagccagcagcccgggccaaaaaataatattatatagaaacgggatggattccgggaagaaaggggagcttttactatgatgagctttttacaaacaggaaaggcactgtacgtgctggcagcaatctgcctggctggagtatttaccaggctgatggcaggaagcttctacaaacgattaattaaagaaagcaccaatatggcattgactaagaacaaatatctgcgcggattgaaacagaatgcagaagatacatatcgtatgaatcagggaatgaataacacacgtgtatatctggagcgccagatgtacagcctgcggacctttggaatgtccgtaaagggactggacaacctgtcggggcagctgacacttctctgcttcctggcaggcggcggagcagcatttctctcttattggtttagaagtgataactactatatagtattgtacggcaccacaggcatcctggccggcatgtttaccatgctggtggattacggagtcaacctggaatccaggagacagcagctccttacctgcctccaggactatctggaaaatgtgatgtggccgcgaatgaaccgggaaggcacagcggagcatgtgcctgccgttacagccgaggaggaccgcagggagccggctaatctgcgttccataggaagagaccgccgttcaaatagtaataacagaagggggctggagcagactgctgccagcagggaaaagcaggaagagaagtcaaaggataactggcttcaggatttaaatccagaacaaaaaagaatgttgggggaattgctgaaagaatttatttcctaaatatgctgacttccaggaatttgttaccagggtcagaaagaaatggtattataagggaaattatgatataatttaagagataagcggctttaccgcagcactgacagaatcatggacgcatggtccatggacataagaaaaggagagcgcgagttatgggaaaggaagttatgtttgattattccaaggcagcaggattcgtttctgcggaagagatggccaattttaagaccacagtcatgagtgcaaaggagaccttgctggagaagactggcgccggtaatgattttctgggatggatcgatttgccggtagattatgataaggctgaatttgcaaggattaagaaggcagcggaaaagattcagaatgattctgacgtcctgctggtggtaggtattggcggctcctatctgggagcaagagcagccattgaatttctgtcgcacagtttttataacgtgctgcccaagagcgttcgtaagacacctgagatttattttgttggaaacagcatcagcagtaaatatatccatgacttaaagcaggtactggatggcaaggatttctccgtcaacatcatttccaagtcaggcactaccacagaacctgcaattgcattccgtgtatttaaggaaatgctcattgaaaaatatggcaaggaagaagccaacaagcgcatctacgcaaccacagacaaggctaaaggcgcccttaagaacctggcagacgaagagggatatgaggaattcgttgtgccggatgacgtgggcggtcgtttctccgtattgacggctgtaggccttcttccgattgcagtaagtggagcggatattgataagttaatggagggtgctgcttcaggaaggcagaaagccttagatgcaccatatgaatccaacgcagcccttcagtacgcggctgtgcgcaacatcctgcaccgcaagggcaaggcggttgaaatcgtagccaattatgagccaagccttcactatgtgtccgagtggtggaagcagctctatggcgagagcgagggtaaggaccagagaggcattttcccggccgcagtggatctgaccacagatcttcactccatgggccagttcatccaggacggatcacgtatcatgtttgagacagttctcaatgttgaggaatctcctgctgagattcttctgaataaagaagacgtggataccgacggcatgaattatctggcgggaaagagtgttgattttgtaaataaaagcgccatgaatggaaccatactggcccataccgatggcaatgtacctaacctgatggttaagattccggagcagaacgagttctatctgggagaactgttctacttcttcgagttcgcctgcggtgtcagcggatatatcctgggcgtgaatccatttaaccagccaggtgtggagagctataagaagaacatgttcgcactgttaggtaagcctggatatgaggctcagagagaggaactgcttaagaggctgtaatgacaggacgggcctgcgggggctggtcagtcataccatataatcttagccggatgaaagctaaatagagatacggcgcagagaaaaggccgtcctgctgatggggtaagtcagcagggcggcttttcgattgcctaaaatatccgggacaccggatttgggccggtttacatcagactctgcgatgtgtaagcttcttagaacctgcgagacataagctccttagaccctgcggagtgtaagctccttagactctgcggggtgtaagctccttttggcgttctgtcccgtcctgttttaactgccgtatcacaaagagaagggtataaaaggccatgaagcctgacacagcaggcgcgattagtccgatgacaaacagattgtccgggcagtaggtgtaggcaagccatatgagaggcattctgaggaccagggcgccgaagcagcagctgaccatggtaaatactgtcttggaacggccgttcatgaagccgttgagacagaatacaaaggatacagccagataatcaaagctgcaggactggaagaagggaattcccgcctcgatgatttcagaattggtgttaaagagaccaatcatggtatggggagacagctgggcccacaggaaaaagacagaggatgccaataccgcaaatccaatgccggctgccagggactgccgtgcccgttcaggccttcccgcgccatagttctgggccgtgatagctgccagggcgctggcaatggaagtggcagggagcatggcaaacacgtcgtatttgctggcaatacccactgcggcggctgcgtttacccccagacggttggtgactgaggtcagatagagaaaggacagccgaaccatgcattcctgggaggaaatggggattcccaccattgccagctccttcagcctgtccttgtcaatgcgcagattcttaagggtaaaggtaaatatgaacttcttcctgttaaggtagataatggagcatatcatgctgatggactgggagaggacggttgccagggccgtgccggctactcctaatttcagatactttacaaagataatatcgcccgcaatgttgagcacacaggacagggccacaaaatacatgggcctgcgggaatcgccgtatccccgcagtatggcacttatggcattgtagccgcagatgaagaatatgccgcagaagcatatggttacatactgtctggcctcatccatggaggcggccggcgtccttaaggcagtcagtatggtgtctctgaaaataagcattccaatggtcagcaccaatgccacaattgcaaatacggacagggtggtcccgatggtgcggcaggtcctttcatcatctttcatgccggtgtatttccccaccagaatggtgccgcccagagtcaggccggataccatgctggtgatgatttgggttacctgggttccggtggacactgcggccacactctcaggcgtacagtaccacccgatgaccataagatccacggctccataaagggcctgtatgatattggcaatcaggaatggaacggagaaggccagcagtacgtgaaatacattgccctctgtcagcagattgtggtttttcatgatgaatatctcctcaatataacatttgttaaaaataaaaataaaccctccagttactggagggtcaataagaaacgcttatttaatttaaaaatatttattccattaagaaatatttattctttcatgcattttaagtatggaatctgtatttccgtcacataccgggatgtatcattggtaaaacccgcatcaatcagtgtgatttccacggaatccccgcagcaggcatatcccatctggtccatatactccaaaagctgtatgtagtactgtgacgcttcctggtgagtgccggaaaagcgcacgctcacataatccccggcctgaagatattgttcctcccccataaagtggtcctccttctcaagaagtacgaatatacctgaaaatgattcaaatttccgggctttcagattggcggcgaacagggaaacgcctaccttgcccagaaacatcacgggttccagggtattggctcgttccagctcgcgaagtgagaattccaggtcctctcccagcctgatatccttcctcagatacgcaatctgtctttggtcaaaatgaagggtcctaatctcaccgcattgtgtatgaaccgcgtcctccagagctttgaggcggtattccagcttctgttcaatctgtgtcagttcgctgatttttgcctgggtttcggccttctgctcttttagcaggtccagcatgatatccacatccctgttttcaaaaaacaatgcgattttctttagggatacgcccagggcccggagatatttgatggtattcaggcgttcaaactggcgggtggagtaatagcggtatccggtatccgggtccgctgtctcaggatgcaggataccgatttggtcgtaataccgcagggtgcgtatgttgatgccgaacaggtcggccatttctccgattgtgaaaagatttttcacgtttattctccactttattcttcaattacctggatttccaggaagtcaaaatctacggattcaataaaattatcctgtgtgaatctggctttatcatggtacttaaattcctttacagtagagtccagccagatgggtttttccagatcaaattcataacaaatagaatccagggaatcaaagaccatctgggttctggataaggaatagtcagatatgcagaccaccgtatcttttaaaagatggttgtctttcattaattttccccacattctgaacataaagcttctcctctcgcaaacgattggcggacatataggtttctgatgttttagtataacatctaatccggtgttttaaaagtcattttttaaccagtattgtttacggtacctggaaggcgaggtttgggtatactggttaaatacccgttcaaagtaggttatattctcgtaccctacggattctgatacttccgtgatgctcatggagctgcctgacaaaagctctctggcgcggcgtatccgtatcatattaatatactcatttactgtgaatccggatacttctttgaaaatacggctcaggtaacatttgttgacataaaaatggtctgctatcatttccagggacaggcggttatcataatggccaataatataagaggccacttcatctacctttctgtgtttgggttgggtagacaggggaaggacgggagatggagaagaaccagacatatgcctttgggcaagaatgaaaagccgggacaaatttgacatggccatatgcctaaatccagtctttttttcatgaagttccttagccgcatcgtccaacaggcactcagccagaacctgttcttccgtatccagggtaagtataccggaatgacagcggaaaaagcccggcaatgacatctcacctgtagatgacaggaattctgagaagggacttgggtcaagggatataaggattcgttcgtgactgcagggaccggcctggctggtctggtgaatctgatttctgtcaatgaacaccaggcttccgcctgttacatggcaggtcctcctgtcaatgaaataataccgctctccctccagcagatagtatatctcatattcattatgaagatgtttgcggggcatggaaaaagcggcatccctgcggatgcggtctatggagatgccgtcggtcttttcagcatatatgatttgttccataatcgttctcctgtatacaaagtacaatgatttataagtaacaggcttgaatgggtcggatgcctgtatactgtcccggatgtatcctggatatatacatcattgtatcttcattgtaccttcatggtacctcatggtatataatcaggaatagtaaatataagttgattacaacagaaattaatcaatatagaataagataattatactaaatttatttataatgtccagtgtagattagagtgataagaaaaatcatggagaaaggaaggcatttaaaatgatttgtgaaaatgaagcggtaaaggatgtacagattgcttacataggaggcggatcccgtggctgggccaggacctttatgacagacctggccatggagcccaggctgggtggtaccatacggttgtatgatattgatacagaggcagccagggccaatgaaatcattggaaaccgcctgtcacagagaaaggaggcagcaggtaaatggttatacaggacctgtatgagcatggaggaagctcttacaggagctgattttgttgttatctctatccttcctggaacatttgacgagatggctgtggatgtccacatgccggaacggctgggcatataccagtccgtaggtgatacatccgggccgggaggcatgatgagagcgctccgtaccatacctatatatgtacaatttgcagaagccatcaaacagtattccccggatgcctgggtcatcaattataccaatccaatgtctttgtgcataaagacactgtaccatgtatttccacagataaaggcatttggatgctgccatgaagttttcggcactcagaaggtgttaaaggggttggcagaggatgttctgggattaagaaacattaacaggagggatatccatgtcaatgtattgggaatcaaccattttacctggtttgactatgcgtcttacaagggaattgacctgttccctttgtacaggaagtatgtggatgaacatttccaggaaggttatgtggaacgggataccaattgggctaatgcatgttttgcctgtgcgcatagggtgaaatttgacttattcaagcgctttggtttaatagctgcggccggagaccgccatctggcagagtttatgccggggaatgagtatctgaaggaccccgggactgtggcaaaatggaaattcgccctgacgagcgtgaagtggcgcaaggaagatttggaacaccggcttgaaaagagtagaaggcttctgaacggggaagaggaggttgaactgaatcccacgggagaggaaggcattcttcttatcaaagcgctctgtggcctggaacgggtggtcagcaatgtgaatatacctaatacaggaatgcagattggtaatctgccggcagaggcagtggtggaaacaaatgccatttttgagcgggataccatccgccctattctggcaggaaatctgcctgagcatgtgaaggagctcattatgccggcagtggaaaatcatgagaccatactggaggcagcgctcacctgcaatgaggagctggtagtcaaagcttttatgaatgatcctcaagttaaaggaagaaaatgcgaggagcaggatatccgactgcttgtaaaggatatgttaagcgctactaaaaagtatcttccggagcctgctctttggtcatgtccgtaaaatggcgcagtggatccaggtaaaaccggcaataccctggtgtatggcatttcggccataatgtgttgccggcagtgcctgtgttcgtcatatttcggccatatttgaattttttgtaacatcccttgcccgtggggattatttgtagtaagctatacgtaatgataaatgttcccataaggaggaaatgcaggtgggacaggcaattacggattatgtaaagttcctggcagatgccagggatgcggtgtaccgtcttaactgtgaccagaatacggccggccagctggcggatgaggaagagatgaaagagcgggagctggagactgccaggaaggctgtgtctgactccgtgaatcagacgattaagaggcgtttggatgagattaattccagctatgaccaggagattggaaaaggacaggaacgtctcaggaaggcaagggcgaaacgggagaaggccaaaagccagggggtaaaggagcggattgccgaggaaaccagcgagctgcgggaacacaaccgggacctgaaggtccagatgaggacaatgcttcagaagaaccgggtgcctgcctggtgtggcaccactttttattacgctctgtactaccccagaggggtcagggagattatgattttccttcttaccctggtaatctgctttctggtaattccatgcggtatctattttatgattccccagagggttatctggtatctggcggcggtgtattttgtggctgtcattttgtttggcgggctttatgtggtgattggcaataagaccagaatccgtcatcaggacacacttaagaggggcagggatatacgcaaccaccttaggtcaaatcaaaagaaaataaaggttattaccagaaccattcaaaaggatgggagtgaggatttatatgaccttgaaaaatatgacgatgagattgcccgcgttgagcaggagctgtcggagattgcttccaggaaaaaggatgctctgagtacctttgagaatgtgacaaaaaccattatctcggatgaaatcatagccagccataaggacaagctggatcggctcagccaggagctggatgaagtaaccgccaatctacgcagtctggagagcagtatcagggagcagaatatacgcatagcagatacctacggtccatacctgggaagggaattcctgcagccggaaaaactggcccagctatctaaaattatacaggctggttcggcatctaatattacggaggccattaagatgtaccaggatgcaggacagtcataaaattttaaatataagagctatgtaaacaggtcctgtagattgcaggacctgtgtaatttatggcgcagcatgtgtaattataatgaacagaggagggtgcaccagattggatatactattcgtagtgccatatccggaattagaaccggtagttcaggagatatacaaggaatatcctgaaaaaaacaaggtcactgtggaatttaaagtgatgacggttgatatggttcgtcagtacaaaatggagagggaatatgatgttcttgtggggcgtaattttacacttgaagagctgaaacaccagtaccccactaaacccgttattaatattccaattacaggttacgatatagttcaggctctctgcgaggccaagaagatgtatcactgcaggaaggtggggattgtgggtcggttttttcatatgtatcaatacgaacatatggaagaaattaccggggtggagacctcctatcatccggttgaccagggacatgatttggaatgctgtgttgccgaggcagtgagccagggatgtgactgtattattggcggctattccacttatctgtatcttaagaacggccctattcctgtagtgactataaaggtcagccgtgaaactatttttaatgtgttggaagaagctgttcatatagcggaagaggttaagaaggaaaaagaaaagtctgagcttttcagaatcattactcaaatttcaaatgcaggaattttttatgttaatgataaaggacagatagagatagcaaacagagaagcaagaaagttgttcccgacagtgcagactttacgggggggggggtcttatctgaggcaaattgctccgtttatgcagcaggaggcggaatgctgttttgagtctggtgaaagcatagtggatagagtatacctgagagaaggcaattctctttctacggatttccttcccgtaaaaataggaaattctatgccagggctggtggtcagttttatgaatgcatcaagaatacagcagatggaaagtcagatacgccggcagatgagtgataaagggttggctgcgcggtatacattccgggacatagtccataaaagtgatattatggataagaccattgagaatgccggaagatatgcgggagtatcctccaatgttcttcttgtaggggagacaggaaccggaaaggagctttttgctcagagcatacataatgccagcaaaagggcgggaaatgcttttgtggcagttaattgcgcggcactgccggaaagcctgttggaaagtgaattatttggttatgtagagggggcttttaccggttcaaaaaagggcggaaaaatgggattgtttgaaatggcccataagggcacactgtttttggatgagattgcagaaattcctttgacatttcagagtaaactgcttcgcgtgctgcaggaacgggaggtgcgccgtgttggcggtaactcagttatatccgtggatgtacggattattgcggccaccaataaaaatctgcaaagacaggtgagtgaagggaaattccggcaggatcttctttaccgtttgaatgttcttagattatacattcctccgctgcgcaagcggagtgaggatatcccccttctcttccattactatctccaatactacagtaatcaattcggttatgaaatgcctattttgtctgaaggagcagaggagctcattaagcaatatgcctttacaggcaatatcagggaacttaggaatatagctgagcggttgagcgtggttcatagcggatatatgataacagaagaagaaatggcaggagcactggggcaggatgatatagaaattactgagtatacagagcggccggccgcgaccggtccctcctatatgatgtatgcggaaggcaaaagggagcaggagaagcagtatatccagcgcctgttaagtgaatacggatataataggagcgagaccgccaaggccatgggaattgaccgctccactttatggcgaaaaatgaaaaaatatgggttgcagtagtgatgcgttgcaaaaatcatcaatagcaacgaattattactacaattgggaaaaaattaacaatacacggaaaagatgcttatttcgatggatatgagcatctttttttatattatggggtaattgtggttgagacatggtgaaatctaatagaaacattttgaaacaggtatacaacagaataatacaaaaaatttaaattatttgtaatcaacaagctttattgtgtattatttatatgtttggaaaaaatgaggaaataaattggagagaatatataatttggcacgattattgctataaaaaatgtaagaacaatataaatatgagacaggaggagagattcttgaatattgcagttttaatgggagcattttttgtattactttttctgggagttccgattgcatattcgttgtgtctgtctgcagtgctttatatggcactttttatggatgtacctatgataatcataggtcagcagatgctgaaaggggtggactcatttacactaatggccataccgttttttgtaatcgcaggcggactcatggaatccggcggtatttcaaaacgaattgtgaactttgccagaacagtagtaggtcatttgccgggaggtcttgctattgttacggtggtggcgagcatgatttttgcagctatgacaggagccggggcagcgactaccgcggcagtgggaggaatcatgattccatccatgcaggaggaagggtatgacggcggctatgccagtgcagtccaggcagtgggaggaatattcggacctcttattccgccaagtatacttatggttctatatggagttgcatccggagaatctgtaggtgatatgctgctggcaggacttgtgccaggactttttcttggggtaattgtcataggggtagtagtatggcagtgtattaaaaagggatacaagggagtaggccattttagcctgaaacgggccgcaaaatcatttttagatgctatatgggccatacttgcgcctgccattattttaggcggtatttattccggcttgtttacgccaacagaggcatcggccgttgcctgtttctattgcctgatcatcggattgttcgtttacagggagcttaattttaaatctctggggaaagtggtatttaaatcagtcaagacagcagcgggtatcatgcttattgtggcagctacccaggcatttggatgggtcctgacaagagcaggaataccccagatggtggcagaaggatttacttctgtaatatcaagcccgactgtgtttatgtttgctgttgtatttattctgattgttgcggggtgtttcatagatgcagtgccggcattgctgatttttgcacccatattgattcctacagcaacccagtatggaatttctttgattcatttcggcgtggttatggtggttaccttatgtattggactggtgacgccgccggtaggaattaacctgtttgtggcatcttctgtaggcggacagcctatacataaaatcataccgcatttgccggtacttattgcctcaattatagcaggaaccatagcaattgtattaatacccggcatttcaacattactgccggcgttaatgaaataaaccataggaggattttattatgagaaagactgtaatgtatatgttattggcagcagctgtattaggtatgggaggttgtggtaaagcaaatcaaccagcttccgctgataatggaggcacagaagcaaaaaaagcagaagcagcaattgaactcagtgtgtttgccggttctgtggcggagaacacgcccaccggtaccggtttaaaagctatggtagactatattaatgaaaatggcggcggtaccctgaaagcgacggattattatgatacagctttgggtgatgccacatccatggtacagggacttcagcagggaacaattgatatcggggtatccggcactgcctatttttctggattggttcccgaggtagaggtatttcagcttccgttcctgtttgacaacctggaggaggccagagcagctgttgatggggctgcttcagaaaaaatatttgagaagtttgccgaaaagggaatcgtgggattggctttctgggaaaacggtttccgcgaactcagcaataatgtgaggccggttacgacaccggcggatttaaatggcattaagatgaggacactgcccgcaaccgtacaggtagaaacatggaaggccttgggagctttgcccacaaccattgacgcatctgagttatatacggcattgcagcagggtactgtcagcgcggaggagaatccgcttcatgaaattgtgtcaagaaagttttacgaggtacagcagtatataacgctgacagaccatgtttacaccccgttcatgatgggaattagccaaaaaacatgggataagctgagtgaccagcaaaagcaggttgtcatggatgcggccaatgtaggtaaagaggcccagaggaaagccaatgaggaaaagacaatagaggcaaagcaggtgctgctggacaatggatgcgagattgtggaaaatcctgataaagaagcgtttaaagagattgcagtgagcgcctggaaggtatttacagatgaaaatggtacagagcttctcgacatcatccagaagaattagaggggggaattacagaatatgagaaaaataactgaccttactctgccagtagtggaacattggcgctatggaatcaagtttgaactggccacatcccatgccaataaagaccgttggcagacaacaaaatataatttgcagtcacattggtttacccatattgatgcacctgtccatcatgacccagacggtaagaatctggacgcatacccaatcagcgactggtgtatttcggattgtctgattctggatttatcatttgtaggtgataatgaggcaattacagcccagatgttggaacgggcaaacgaaccctttaaggataaacattatgataccattataatccgttctgaccgtggaagaagggtatcttgggagtcagtggaattttgggataattcctgttgggtcagcgctgacggaggaaagtggattagagactataatcctaaagtggttggatttgacttccctcaggattatgaaatacgcaaaatccgtactgcaaaaccagaggatccgattgtacagccggtacatgatttcgtcctgaaagaggggggaatattaatgattgaatatctcaccaatttatgggaagtagggcagccgacctgtcagctgattgcgctgccgcttaacacaaaaaatgcggatggctcccagataagagtaattgcggtgacagaacaaccctaggaggaatgaaaatgaagggattggtttcaaagcttgattcaggggtaaagagtatatttggctatgtgggaattataatgattttaattgagacctatgctgtctttgcccgtaatgttctgaaggctccggcgccatggacagatgaaacactgaaaatgctgtttgtatggtctatatttgtttgctccagtctggcttttatgggcgatgagttaatcggtctggatcttattcaagagaaaatagctgataacagaaaggcttatggaggtttaaaaatactccaatatgcccttggtctggtattcggagtcctgacgactaactggggtcttaatatcattttaatgcagctttccacaaatgaaaagacagctgtcgttaaatatccgttatggataattaatatgggttttctgttaggaagtgtgctgctggttatatttgccttatggaaaatatacgattgcaggaagtattttaaggataatactgctaaaaaagacgggaacagataaaaaatggaggcatcgctcaatcatccgtaacagatgactgaacggtgcctccgtttagctgcagccttatgaagttaatattaagctgcgctttggagtctctccaaaggcacactgccaggcaccttcgttgttatgctctatatcctcactaaatgatacttcacctgattcgccgtcagcagctgtgcctcccgctgatggcaggtaaacacaataatctgattatcatacgccttcacaagccattttaacgctgtcttcagacgttcatcgtcgtacagaacaaaactgtcatcaaaaatcaggggcatggtatcccttcggccattctggaccagcttggcggcggccaggcgcagggccagataaatctgatccatggtgccgctgctgacctgctctattggaaccagcttggacggcgtgttcatgaatacatccaggttctcgtcaatgctcatgctggtgtaaattcctccggtaataccggatataagatcagaggcctccctgttcaggtataatccgaaggagtcgcggatggaggtggacagggtggtcatggtgtcctgggccaggtcgatggcgtccagttcctcctgaatgcgttcattctccgccagaacatgtttcagggcttcggccctggtcttgcagtcagccagatgttccagcttctgttccagctcccactggatacgctgctgctgttctatctcctcggaaaactggtcctcgctggactggagctttccaatctcctgggataactgcaccagggtctgctcggactgctccacagccttgctgagccggaggaattccgccatccttccctccaaggcattcatggcatcctgggagatgctggaatcgcccagatgacgggcgaatatttcctggagaaggcgggtgctggtgtccagttcctttctaaaacggcggttcttgcccagcttaaggattccggttatacaggcagccagggcaatggcgcctgatatccccgccgcggctgtaaggggaaacggaagaagaacaagggagcggaccatctccggcgcggccaggcacagcccggcggctcctgcgaaggccagggtaatgaggaacatgaatacagcacagaccgttctggattttttactgcaggcagccagggtgttctggtactcaccgtaaagcttcctggtgtcctccatgtatttttgtacggattcctgatctgtaaactggctgtttaaaagaatctggcgtccttttgcagacttttcaagcagcccttctttttccttctgacagcactccagctgctttttgatttcactcttcttattgcggtactcaattaactggttggcatactgaggcgcggatatttcctgctccgtcttgcgtatatcacctaaaagggctgtataactgcgcgctgcctcaggaaccacctgattctccagctcccgcctctggctttttaagtatgcggtggccttagttatattcagggcaatgctgccggaggtattgaggttggcgatataattgcgcagctcagctaccatgcccccgtccgtggcgcactttaactggccgatgctgatggtgttgtcgtaggctgtttctgacaggccgcagcggagctggtctaagagtgctttggtgggctccatctccctgccctgagtttcattgacaatggtcagctccttgttctgcttctgaaaccttctctggatacggtatatctggccttcgctctccagccgcatccatccctcgtaggtgccgcttcccttccatggctcgtatttgctgtagacatcattcctggcagcccggcctctctgtttctcaatgccaaagagcattcccctgataaaggtatgaagggtggatttgccggcctcatttttgccgtacactacattcagcccgtccttaaaggagatatccagatcgtggaatttaccgaatccctcaatgtgcagacttaatatcttcatgggttcagctcctttcatcggtggtatgcagaagagcatttaccccgtaatacagggccttcttctccaccggactcatatcttctttttgaagggcctggatatagaatccaatcatatcgctggagtgctcggcaaacagtgctgaaaaatcatactgaggttcggaatcatcaatgatttccgcaattctgtatctggctgagagctgttccaggtcaaattcaatgtcaggatccctcatgcccctgattcggaaccggtaaatatgctgagaaccccggttttcaatttcatttgatatccggtcgcacagttctccgttggtggtgtccttggacacattcacggcaagcggtatgtactggaggctggcggcgggaatgaactggaggtttatcagttttctggtgacaggatgaatctctcctgcatagaagccatgagaaccggtctcggtcagatccaggggttcaggtgagccgcagtaagcaatctttccgtctgccaggacatgatgtttgtggatatgtcccagggcaatgtaggaaaatggggacagctccaggctgttgaaattgattggcaggtgggcggcgtcgccgccatgggccatgaggatttggatacggctgttcaggggaacctgtatatcctccagcaggggcgccttgatttcagccgtatgatagctgaatccatggacctccgtgttaatatcctcaaaatagacagaggtcaggtcttcatccattatgaaggtcacgttgggactccaggtaaagcttaacagggcagaattctccctgatgcggtcatggttgcctgctatcaggatgatctttacagacggaatggtggagaagagataattgacctccttaaggtctttcatcagcggctgcctgtgaaacaggtctccgctgatgaataagcagtccacatccatctcttttgtcttttctatgattatccggaaggtatctttgatggcctgggcgcgttccttgccccagggcttgtttgcatcgggacacataccccagtggatatccccggtgtggatgaatttcatgtctgcctcctgtcaaatgttgagttcccgaacgctgcgctgctgcgtccgggcagcaaatatttgcccgctggcgctgggcaggcagagacgggttccccgaaccccgcgctgctgcggctgggtagcgaatttctgcccacttctacggggcaggcagagacgggttccccgaactccgcgctgctgcgtccgggtagcgaatctctgcccgcttctacggggcgggcagagattctttataattcgcagttgtttactgttcttgggaaggggattacgtcgcggatgttggacattccagtcagatacatgacgcagcgctcgaaaccaaggccgaagcctgcgtgacgcgtggatccgtacttcctcaagtccagatagaagtcatagtcctccttcttaaggcccagttcatccattctggctaccagcctgccgtagtcgtcctccctctggctgccgccgatgatttcaccgataccgggaaccaggcagtccacggctgcaacggttttattgtcaggattcatcttcatatagaaggctttgatctccttcggataatcagttacgaatacgggcttcttaaatacctgctctgtcagatagcgctcatgctctgtctgcaggtcgcatccccaggagaccttgtagtcaaattcatcgttgtgttcttccagtatctttacggcctcggtgtaggtaacgcggccaaactcggaatttaacacattgtgaaggcggtccagaaggcctttgtccacaaactggttgaagaagttcatctcctcaggcgcatgctccaggacaaaacggatgatatatttaagcatgccttctgccagacacatatcgtcatccaggtcagcaaaggccatctctggttcaatcatccagaactccgcagcatggcgggtggtattggaattctcggcgcggaaggtggggccgaaggtatatacgttgcggaaagccatggcataggtctcggcattcagctgtccgctaacggtcaggttggtggccttgccgaaaaagtcctggctgaaatccacctttccctcctcagtttttgggatattgtttaagtccatggtggttacctggaacatttctccggctccctcacagtcgctgcctgtaatcagaggcgtgtgaacatacacaaaatccctctcctggaaatactggtgaatagcgtatgcaaccagggagcgcacacggaatacagcctggaaggtattggttctggcacgcagatgggagatggtgcgcaggtattcaagagagtggcgctttttctgaagtggataatccggtgaggaggtgccctccacagttacctctgcggcctgaatttcaaagggctgcttggcctggggcgtacttaccagggttccctttacaaggatggctgtgcctacgcttaatttagaaacttctgcaaagttgggaagggtgtcgtgatatacaatctgcaatgtttcgaaaaagcttccatcactgacaacgatgaagccgaatgctttggaatcacggagactgcggacccagccccccacatttatctccttgtccagatattcctccggatgtttgtaaagttctcttacggtaatcagatccatgactgatattctccttttctcttatctatatattcagtatccccaattcccctggaaatggacggtaactacatatacgtgattatatgatatttcacgctatgtttcaaggcttaactttcctatggagccgggtgtgaagcctgtattttcaatatgattacataatcataatgtttaatcggggaaaatacccgtaaggtacgttacttaactgaagcggattatgccgtatgcggattatgcagcatttgcattatgccgtgtgcgttttatgtcagatgtccgcggaactgcgcgttccagaaattggaatgcaccgggtacctattatctgatattatgtttatagctgtttttgacaaaaacgtccgtgaatatacagcctgcgagggggacttatttagtggtaaattttggaaaggggtactagatatagataaatcaacatcaaatggttaaaaacggaaaaaatgtcggaaaaatgcacaaaaacgatgaaataaatttaaaaatttatgtactatttacgaagtttgtggtataattaaaattacaaaaattttaacagcaagaggtgataacgtgattaaaaaagaaatgatagctatgctattagcaggcggacagggaagccgccttggcgtgctaacacaaaaagtagccaagccggccgtatcttttggggggaagtaccgaatcattgattttccgctgagcaactgtatcaattccggagttgacacagtcggagtattgacacagtatcagccattacgtttaaattctcatattggaattggagtaccatgggatttagaccggaacgttggtggtgtaaccattttgcctccatatgagcgcagtaaaggcagtgattggtacacaggaactgccaatgccatttatcagaatctggagtatatggaatcatataacccggaatatgttctgattttatccggcgaccatatttataagatggattatgaggtaatgttggattatcacaaagccaataatgcagatatcaccattgctgccatgccagtacccattgaggaggccagccgttttggcatcctgattacggacgagtctaaccgtatcacggaattcgaggagaagcctcctgttcccagaagcaatttggcttctatgggtatctacatattcagctggcctgtattaaaggaagcactgatcaagatgaaggaagagccggggtgtgatttcggcaaacatatcattccatactgccatgcgagaggcgacaggattttcgcatatgaatataatggctactggaaggatgtaggtacgctgggttcctactgggaggccaacatggagctcattgatatcattcctgagtttaacctgtatgaggaatattggaagatttacaccaagaatgatgtgattccgccccagtttatttccaatgaggcaaatatcgagagaagcattatcggtgaaggaactgagatttacggcgaggtaatgaactccgttattggagcaggcgttactgttgccaagggagccgtggtgaaggattccattataatgcagggaaccgtcatcggagcgggaaccgttgtgaacaaggccatcattgctgagaatgtaaggattggctctggcgtggaactgggaacaggagagtatgcgcccagtacatatgaccccaaggtatatcagttcgatctggtgaccattggtgagaattctgtgattcctgacggggttaaggtaggcaagaacactgccatagcaggcgagacaaccgtaggcgattatcctgacggattactggctggcggaaattacattataaaggcaggtggcgtaaaatgagagcaatcggtatcgtattagcaggtggtaacagcaagaggatgcgggaactttctaataagagggcagtggctgccatgccggttgcaggaagctaccgcagcattgactttgcactcagcaatatgacaaactcccacatccagaacgtggcagtttttacacagtataattccaggtcattaaacctgcatctaagttcctctaagtggtgggatttcggacgtaaacagggcggactctttgtattcaccccatccattacaccggagaacggcgactggtacaggggaacagcagatgcattataccagaaccttacattcttaaagaacagccatgagccatatgtggtcatagcggcaggcgatggtgtatataagctggattataataaggtcctggagtatcacattgagaaaaaggcagacattaccgttgtctgcaaggacatggaagatggcacggatgtgacccggttcggctgtgtgaagctgaatgatgacggccgtatcacggacttcgaggagaagcccatggcatctgacgccaccaccatttcctgcggaatctatgtcatccgcagaaggcagctcatagaactgctggagcgctgcgcggcagaagacagatacgacctggtcaatgatattctggtgcgctataagaatcttaaaagaatttatgcttataagctggatggctactggagcaatatcgcttctgtggactcctattataagacgaatatggatttcctcaaacctgaggtgagggattacttcttcaaacagtatcctgatgtatacacgaagatcgatgatcttcctcctgccaaatataaccctggcgcgctggtcagaaacagcctgatatccagcggatgtatcctgaatggcacagttgaaaactccattctttttaaaaaggcatacgtgggcaacaattgtgtaatcaagaattccattattttaaatgacgtctatataggtgacaacacagtgattgagaactgtatcgtagagagcagggataccatccgtgccaacaccacacacatcggcacaccggagaacatcaaaatcgttgtggagaaaaacgaaaggtatacattataatacgcacatagccccgcgcagcgcacggggagcgcagagcgggggaccggcgggataagacggaaggggtagaaaacatgcaggttacagacgtgagagtgagacgggttgaaaaggaaggcaagatgaaagcaattgtttccatcacactggacaatgaattcgtcattcatgacatcaaggtaattgagggggagaagggtttattcatagccatgccaagccgcaaggcagcggacggagagtaccgcgatattgcccatcctataaactccaacacaagggatatgattcagaccatcattttgaataagtatgagacaaccttgctggagaatgaggcggcagaggaaggaatggcataagatacagaaggatgaacaggagctgatttcggttgatacattatgaaccgggacggctcttgttttttgcatatgcctgtgctatagttgagttatattttcagatgtcggacagacattctttagcgccttcaggcgctgtgacggccgtttcggccatagattcaaattgtgatactgcaatagcatgtttagaaggagccgggtgatgccatagagcgttggtgcagctttccgggcaggacagaatttcagatacagctattgctgacagagacataatttattataataaagggagagtgtgtatggataaaaaacggcttcaatggcatcccggtttttttgcagtattgcagattgaactggaggaagagcggcggtttctgcggttttacgcggagtataatcttacaaggaagcccttgcagattgacgttctggtggtcagaaaggaaaccggacgagtgatacaaaagaacattggccgcatattccgtcagtataatgtggtggaatataaggggataaaggattacatcagtataaatgatttttataaatctataggatatgcgtgtttactgcagtccaatacggagagggtccaggagattttgccgtctcaggtgacggtcacattggcaggggaacattatccgcggagcctgcatgtgtttttggaaaaggcttatggagtgcatatggaggaggaagccccggggatatattacattaagggacttttgtttccgctgcagattctcgtcataagggaactgtcaaaggaggacaatatctggctgagccgtttgagaagcggactgaagccggatgaagacattgaagtactgatgaaggagtataaggggaaggaacagaatcccctgtatgagacagccatggatttaatattgcgggcaaactgggaaacgtgtcaggaggtggagaagatgtgtgatgcgctgcgggaactttttgcagatgagctggaggagcgggagaccatagggcttgaaaagggcttggaacaggggaagatggcgaaattaataacccaggtcatgcgtaagcgggaaaaagggcagtcggctgccaggattgctgaggatttaatggaacccgcggacgtggtgcagaggctgtatgatttaatcgggctgcatccggattctgacacggagcatatattggcatatatgaagtcctgggataaggtgtaatagtgcggataagaacacaaaaacgtttggggtcccctcaaataaggggattccaaacgttttgatattacagggtttccatctgtttcagaatacttcttgccacgcttatgccatttgcagaggcctgctgcagccctctggtgacggaggcaccgtctccgattgcccgcagtcccctgatgctggtttcaaagtcagcgttgaccaccaccttattggaatagaacttgacctcaacaccgtagagcagagtttcgtcgctggcaatgccgggagtcaccttgtccagggccagaagcatttccttgatatccgtcatgatgcggtgggggaataccagggacaggtcacccggcacggcatccttcagggtgggaatcaggttgttgcggcagaggcgctcctccgtggtccggcgtcctctctggaagtcaccgaaggtctgaaccatgattcttcctccgcagagcatgttggacagctgggcaatgtgcttgccgtattcaatgggttcgttgaagggtttggtaaagttcttgcttaccagaagggcaaagttggtgttgtttgtcttatactcctgggatttgtacgcatggccgtttaccactgcaaggccgttttcgtaatattctgtggccacctccccggaaggattggtacagaaggtgcggaccttgtcgtcgaaggtgggggtatagtataccagcttggcttcatacaggttttcgtttaagaacttcataacctcatcccggacttccacacgtacgcctatgtccacagtgcctacctgggtctggattccgtggtttccgcagatgtgtgaaaaccagtcagaaccctcccgtccgatggcggaaaccacctcaggcgcatagtaggtttcgtccttgtctgtgatgatgccctttacggtatcgccttcaatgataatgtctctgaccatggtgttgaattccatggtaatgccctgggccagaaggtgctcctgaagccgggtataaatcttatacccctcctcggttcccagatgtcggatgggacattcaatcagctttaagttagcgccaatggccttgcggcggatttcctctatttccttctgtttgtccatgccgtatacattggtatcagcgccgaattttaagtaaatattatcagattcctttaagagttcaactgttttatcataccccaggatttccggaagattgcctcccacatcaggggacagggacagcttgccgtcagaaaatgcgcctgcgcctgcgaagcccgtggtgatggaacagggtttgcagcccacacatgccttggtggtgcgttttgggcagactctcttttcaatggggcgccctttttccaccatgaggattttcatgccgggtttcttctggattaattcatacgcgcagaagatgccggagggacctgcgccaataatgattacgtcgtaatttgtggttggattcatagggaaactcctttctttcactgcctgatttgcctggtttcatggcacaaaaaaaccagtatacaaaaatagaagcatgtagtcaactattccggtagctggtagaaacgttcatccaatcatgaacttatacaggcatcacaacggttatagtttagcatagtatgtggtgttatgcaagggcggaaagccgtaaagtgcttatggaaaaggcttcggtaaaggttccggtaaaggcctggagaaaggcccggtgaaaggcctgaaaaccttaagaaaaaccaatcagacctttagaaaaaatttcataaatagtcagagaatagtcacggtatattaaggcaaattcaaagattattgtattctcttatgatatgatacatatatgagataagatgattccaacatatatgattcagaagagaaagcaggtgaaaggatgaaggtgcgtacaggtatcaagtgggtggcagctataatgcttatggtggtgctgtgcttcagcgtgacagtggctgtgaagggatacggaatgtaccgggaggccgtggacagtatgagccttgaagataaagtggcgtccatacgtgccaaggaaaactataccacctttgaccagcttcctgagatttatgtggatgcggtgctgtccgtggaggaccacaggttctataaccatccgggaatcgacgtgatagccattggaagggctgtattcaatgatataaaggcaggggcctttgtggaaggcggaagcacggtgacacagcagctggccaagaatatgtatttcagccaggaaaaggagctggtccgcaaggtggctgaggtcctggtggcatttgatttagagaggaattacagcaagaatgagattctggagctgtatgtgaataccatttattatggaaacggatattactgcgtgagggatgcaagcaatggctacttcggcaaggagcctgaggacatgacggattatgagagcacattgctggccgggattcccaacgccccatcctgctatgcacccactgtgagccaggaactggcagccagacgccagcagcaggttctggaccgtctggtgaaatgcggatattttacagaggaacgggctttggaaaccatggcagttggaagcagccggtgatgacgggaatatgattaacagatagaggctggcagatggaggaaagagccctccatctgctttactttttaagcgtaatctgatagaatgatggaacggaaaaaagcgttagatacccccatgtggtttgtatctaacgcttaaaggcgtgttataaatataggaatatattggaaaatgcgggcaaatcataaaactggaaggcaaagtgacggaaaaatgagcggaatatgggagaaaataaaagagcggctgggatttggcaggaaggcagaaggtgataaggaggatgacagggtaatgtacatcattgcggggttaggcaatcccaccagggagtatgagaagacgagacataatgtgggctttgaggttatagatgtgctggctgaccgtctgggcaccaccgtggaggagaaaaagttcaagggatgttacggaagaggcatcatcggcggacagaaggttctgcttttaaagccccagaccttcatgaacctgagcggcgagagcgtaagggctgcggctgatttctataaagtggacccggaacatattattattgtatatgatgatatcagcctggatgtggggcagctgcgaatccggaaaaaaggcagcgcagggggccataacgggattaaaaacatcatttcccacctgggaacccaggagttcccgcgcattaaggtgggagtgggcgacaaacctaagaaaatggacctggctgactatgtactgagccggttctccaaagaggacagggctgtcatggaggacgcgttcagggaagctgccggggcagtggagatgatgattactcagggcgctgacgcggcaatgaatcagtttaacggccataagggctgataaggggtgcagggataaaatggaaaatccattattagaattacaggagtatgacaatctggttcaggcactgaaatccggaaagggaccgctgcaggtaacagggaccctggattcgcagaaggtacatctgatgtacgagctgggagaggcaagcgcattttcctggaaactggtggtcacgtatgatgacaccagggccaaggaaatctacgatgatttacgcagctttaccagccgggtgtggctgtatcctgccaaggacctgctgttttacagtgcggacattcatggaaacctgatggccagacagcggattgctgtgctgcgccgcctcatggaggacagggagggcgtggtggtcaccactatggacggccttatggaccatctgctgccgctcaaatatctgagggagcagtccatcacggtggagagcggacaggtgattgatttggatgtctggaaggaacgcctgattgccatgggctatgagagggtggcccaggtagacggcatgggccagttctccatcagaggtggaatcgtggacatttttccgctgactgaggaagtgccggtgcgcattgagctgtgggatgatgaggtggattccatccgtacctttgatctggaaagccagcgatcggtggagcagttagagaacatcaccatttatccggctgcggaggtggtgctctcagcagaccagctggctgccggaatcagaaggctggaaaaggaagaaaagacatatgagaaggcactaagggagcagcataagccggaggaagcccaccgaatccacaccattatcggggagctgcgaagcggactggacgaggggtggaggattggcgggctggatgcttatatccggtatttctgcccggatacggtttccttcctggaatattttccccagggtgagagcgtgatctttctggatgagcctgccagattaaaggaaaagggcgagaccgtggagctggaattcagggaaagcatggtgcacaggctggaaaaggggtacctgctgccgggccagaccgagcttctctatccagcggccgagatcctggccaggatgcagaaaccatatgctgttatgcttacagggctggaccagaagcttccaggcatgaaggtaaatcagaaattcagcatagatgttaaaaatgtgaactcataccagaacagcttcgagattctcattaaggacctaaccaggtggaagaaggaaggatacagggttattcttttatctgcttccaggaccagggccagcaggcttgccagcgacctgagggaatatgacctgagggcctattgcccggatgggcgggaaggggaaagcggaaatgcaggaggagagggcgccggcagcgcggataccggaaatccgggcgctgtaaatacctctgtccgcaaggtccggccaggagagattctggtcacctacggcaatctccacaggggatttgaatatcctcttttgaagtttgtatttatcacagagggcgatatgttcggcgtggagaaaaaaagaaagcgccgtaaaaagacaaattaccagggcaaggccatacagagtttcacagagctgtccgtgggggattatgtggtccatgaggagcacggcctgggtatatataagggcatcgagaaggttgagcgggataaggtcatcaaggactatatcaagattgagtatggggacggaggcaatctgtatctgccggccacacgtctggaaagcatccagaaatacgctggagcagaggccaagaaacctaagctcaacaagctgggagggaccgagtggaataaaaccaagaccagggtccgtggggctgtccaggagattgccaaggatttggtgaagctttatgcggcgcgccaggaaaaggccggattccagtatggaacggatacggtgtggcagagagagtttgaggaactgttcccctatgatgagacggatgaccagatggatgccattgacgcggtgaagaaggatatggagagcaggagaatcatggaccgcctgatttgcggtgatgtggggtacggtaagacggaggtggccctgagggctgcatttaaggctgtccaggacagcaagcaggtggtatacctggtgccaaccacgattctggcccagcagcattataatacgtttgtgcagcggatgaaggattttccggtgcgggtggatatgctgagccggttctgcacgccggccaggcagaaaaggaccctggaggacctgcgcaagggaatggtggacattgtaatcggcacccaccgggtcctgtccaaggatatgcagtttaaggacctgggactgctgattattgacgaggagcagcggtttggcgttgcccataaggaaaagatcaagcacctgaaggaaaatgtggatgtactcaccctgacagccacgcctattcccaggacccttcatatgagcctggcaggcatacgcgatatgagtgtgctggaggagccgccggtggacaggactcccattcagacctatgtgatggaatacaatgaggagatggtgcgtgaggcaatcaaccgcgagctggcaagaaacggtcaggtgtattatgtatacaatcgtgtgacggatattgatgaggtggctggccgtgttcaggcccttgtgccggatgctgtggtcacatttgcccatggccagatgcgggagcatgagctggaacggattatggcggattttatcaacggggaaattgatgtgctggtgtccaccaccatcattgagaccggcctggatatatccaatgccaataccatgattatccatgatgcggaccgcatggggctgtcccagctgtatcagctgagaggcagggtagggcgttccaacaggacctcctatgcctttctcatgtataagagggataagcttttgagggaggaggctgagaagcgcctccaggccatccgggaatttacggaattgggatccggcatcaagattgccatgcgggacctggaaatccggggcgcgggcaatgtgctgggggcagaacagcacggccacatggaagccgtggggtatgatctgtactgcaaaatgctgaatcaggccgtgctggcccttaagggagagaccttggaggaggattcctacgataccgttgtggagtgtgatattgacgcatatattccgggacgttatatcaagaatgaataccagaagctggatatttataaacgtatttccgccattgagacagaggaagagtatatggatatgcaggatgagctgatggaccgctttggggatataccgcgcagtgtggagaacctgcttaagatagcgtccatcagggctctggcacaccaggcctatgtgacagaggtggtgattaaccgccaggaagtaaggcttaccatgtatcagaaggccaaattacaggtggataagattccggacatggtgaggtcctataagggtgatttgaaactggtgcccggggatgtgccttccttccactatattgacagaaggaataaaaaccaggacagccttgagatgatggggaaggcagaagagattctgaaaagtatgtgcgggatacgcatataaaatactatgataacacccagatacaggaaggccgcgagaacaggaaaatccccctgtttctcgcggcctttctgtgtcaggaccttattctgcccgttcttcttctttgatttcccagtgaatcaggaaggtaagggcggcccttaatgcaatgattccggccacaattcctatttccttccactcacggaccaccaccgtgcgcaggatttcgcttcccatcttaaattccagtcccatggccaggccctttgccagatatatcttggtgtccggggaacgacggagaaatttaaggaagcttgtgagacctgagtatataatgatacccacgccgataaattcaaaaataatgattgcggtgtttgctaccagagacagcagccattccaaatgttccatggtttgttccctttcttttacttgttcaccggcacctgaatggattttacctttacaccgtccacctttcccaggtctccggcaaaggaactgatttggttctgggttccgtgcaggaccacgctgatgacggataccccgtaatcccggcagggaacacccaggcgggcgataatcagaccggactgaaggtggaatttttcatttaccgttgccacggaatcaggattgctgatgatgcagctgatgacagccagacggtcttccataaagtatgtcctcccttattgttttctacccggcaggcttttacagcagctggattcatgcttttttccgggccggggttatctgtggttatgatatcacgggtattgacctttcgtaaagcccaaacaaggtgcaggacaagataattttttaacccttgctttttccttccgcctggaatatgatggtaataactaaatagaacctttctctgatgcgaagcaaccctgagataaagagagagcggaactgtcctggctgtgcaggagctgttttgcgtggtttgccagtgtgtgccgtatgcaggcacggttggcatgaaccgcgtatatggcctgttggtgaagcctcggtatgctgatgatatcctctctctgaatttcggagagaggttttttgtgttttaaagacaagagggggaggatagaacatgttaaaaatagcggtttacggaaaaggcggaatcggaaagtccaccatttcatccaatttatcagtggcgctttcagagcggggatacaaggtgatgcagataggctgcgatcccaaggcggactctaccatacagcttcaccagggacatacagtgacctctatcctggatatcatcagggccaggggagataaggcggggcttgatgaactggtgacagagggaagcgggggtgtgctctgtgctgaggcgggaggtcctaccccgggcatgggatgtgccggccgcgggattatcactgcttttgaggcgctggaggagaggaatgcctttgaggtctataaaccggacgtggtcatctacgacgtgctgggcgacgtggtctgcggaggctttgccatgcctatccgggaaggatatgcggacaaggtatttatcgtgacgtccggggaaaatatggcaatctatgcggctgccaatatagccgcggcggtaaagtcctttgaagccagggggtatgccagcctgggaggcatcctcctcaaccgccgcggcgtgaagcgggaacaggagaaggtggaggagctggcagaggacatggaaacggaaatcataggctccctggattacagccctctggtgggagagacggaggagcttggaaagactgtcatggaggcttatcctgacagcgatatggccgggcagtacaggaaaatggcgggcgctgttttagcggcctgcggggaggaagaggtgaagaaggcctatgcttaagagactgcatgacactgcggggcaggatacggcccttgccctgtcccaggtggacagcctggcaccttttacatacggattggaatacagcgccccggccaggggaggatggaccattgtccatataggaatgctgctgcctgagagccatcaggtattcgtatgcgcccagagctgcctgaggggcgtggtactgtcggctgcggagcttggcgacagcagccgtttttctaccatatccgtggatgaggattcggtgctggagggaaactgcgaggagatcatcattgagggagtgactcatatcctggagggactgcctgcgctgccaaaggccctgctgctgtttacaagctgtatccatcattttctgggaacggatatgaaaatcgtattcggggagttaaacacacgttttccacaggtgggattcgtgcagtgctggatgaaccccattatgagaaagactaaaatgccgccggacccttttatgagaaaacagctgtattcccttttaaaacctgctgatatgtgtacgaagcaggtaaatgtcatcggcaataatctggctctgcggaaaagttcagagctttataatatcttggaaaaaaatggatttaatattaaggatatatgtacctgccgtgatttccgggaatatgagaccatggcctcatcaaagctcaatctggtgacgaatcctctggggcggcctgcggcgaaagagctttgcgggcgcctgggacaggaatgggtctatctgccggtgagctatgactgggaacagataagggaacactggaaatgcctgtcggatttgctggaactggattttgactccatctggaaagaagtagagatggatcagctatggcagaaggcagagacggccctggaaacgcttgcgggagagcttgcggggtggtctgtggctattgactatacggcatcttccaggccctttggcatggcgaagctgcttgtcaaatgcggtttccgggtggaacgtatttatgcggataccatatcgccggaagaagaggatacctttgcctggcttaagaagcaatgtccccggatgctgctctgtcccacggtataccacaagatggcggttctgcctaggacatggtgccgggagacgggaggaaaggtgctggcaatcgggcagaaggcagcctactttacagggacttctcattttgtaaatatggtggaggacggaggactgtacgggtacggcggtatcctggagctggccgccatgatggaagaagctgccggggaagaaaaggatacggaaaaactgatacaggtaaagggatgggggtgctgctgttgaaacggacaaaccggattctgccggtatacgcggcggatatatcaggaatctgctcggccttatatgagctgggcgggatgactgtgatgcatgatgcctcaggctgcaattccacctacaccacccatgatgagccaaggtggtactccatggacagtatggtgtatatctcagccctgtcggagctggaagcagtcatgggggacgatgaaaagctggtgcgggatatcgtggacgcagcgctgaatctttgtccggcatttatatgcattgggggaacccctattcccatgatgatgggaactgactttaaggggattgccagaatgattgaaaataagaccggaatccccacgtttggtattgccaccaatggaatgcattcctatgtccgtggggcaggggaggctctgaggtggattgtgaaacggttctgcccgcccgggattaaggcgggcaggccggcagccctgaaagttaatatactgggagtcactccgctggatttttcccttacgggaaacacagccagattaaaggattttctcagaagccatggaatggagaccgtgggatgctgggccatggaaagcggcctggatgaactgcggctggcgggtctggccgacgtaaatctggtggtatcggcagtgggacttccggcggccgcagagttaaagaagatgtacggaacgccctgggtggtgggaacacctgtgggcaggagaacatccgggcgtctggcagaatgcatccggcaggcggcgcggaccggtgaaaaccaaagcctgtttgatggtgccgggtatgtggcctcatgggatgcagccgcgagtatccggcctgattttgggcttgccggtctgcctgaggatttatccggcagaaaggttcttatcattggggaacaggtcatagccggttccctgcggtgctgtctgcgggaggagtggggcgcggaccaggtaaccgtgctttgccccacagagggggagaaggctcttgctctggagggagacatcattgactgggatgaggatgaagttatccgcgcaatagcggaaagtacggttgtggtggccgatcccctgtaccgccaggtgtgttctgcccacaggaatattgtgtttgtggattttccccatgaggcatgttccggcagaatgtatcacagtattatgaggccctttgtgtgcgctccggatgattcggtttaagggtaaacaggtataaatacaggtgatacacaaagggtaaaaataaagggttgtaaggagaggaagagtattatgaaaaagttaacagcaatcattttaagcgtgtgccttggggccgccggattaacaggctgccaggccggggcatcagaaacaccggctgcgtcaagccgggccgcagacaccggccggcagcaggcggaaaagggaccgaaagaggaaaccaaaagccgggaagactccgccggggaaccagacgcatcccaatccggcggcactgttattataacagaccatgcgggcagccaggtggagatacccagggaagtgaaccgtgtggtggtaacggatatccttccccttccctccatcatcacagtgttcctgggatccggggagaaaatcgtgggtatggcgccggccagcatgagcgctgccaggacaggacttctgggagagctgtttcccgacatcctgaatgccagcacggattttatgaacggcagtgatatcaacatggaagagcttatgaaactggagccggatgtggtattttacaatgcgggcagcaaggaaatcggggaggcgctgcgctctgccgggtttgcggcagttgcagtatctgtaaataaatgggattacgacagtatagagacttacgaccagtggattagcctgctgagtcagattttcccggaaaagggtgatacggcggagcaggtctcccggtacagccagaacatatatgaggatatccagaataaggtgtccggtttaaaggatgaggagaagaaggatatcctgttcctgtttaattacagtgataccaccatggtgacctcgggtaagaaatttttcggacagttctggtgcgacgcagtgggaggccgcaatgtggcggaaggtgtggcggctgagaattccaatgcggttatcaacatggaacaggtctatgagtggaacccggatattatttttatcactaactttaccccggtccagccagaggacctctatgaaaatgcggttggacaggacgactggagtccggtaaaggcggtacaggacaagaatgtatataaacttcctctcggcacctacagaagttatacacccagcacggatacgcccatgacgcttttgtggatggcaaaacaggtatatccggacctgttttcggatgtggacatgacccaggaggtaaaggattattataaggaactatacggcgtggatttaagcggagagcaggtacagaggatgtaccatcctggccgggaggcagcggccggatataagaaataggcgttaatgcacaaagccggaatgatatgagggtggaataaacgtatgaatggaagtaaacgaagctggaaccggtactggaccctgggttccctggcagtaatttttgcagccgcggccgcggccatggcaatcggccggtttaccattgctcccaaggagctggcggctgtgctgatacctggttccttcccggatgtccaggtttcgggacaggtgaggacggtcatatccaatatccgttttcccagggtggtactggcccttttgtccggggcggggctggcggcagccggggcggcatttcagggattatttgccaatcccctggctaccccggatacattgggagctgccaatggagcctcctttggggctgtccttggcattctgttaggtcttccggccttcggcatacagacccttgccatgattacaggagttgcggccgtgctcatggcctggagcgtggcccaggtgagaggcaccattcctccgctgatggttatactggcaggcatggtggtcagctccctgttttccgccctggtatctctggtgaagtatgcggcggatccccaggacgtacttccgtccattacatactggcttatgggaagcatggcatccaccaccaggactactcttattatgggggcgccttttatccttgcaggaagcctgcttttgttccttttgagatggaagcttaataccatgtcgcttcctgaggacgaggcaaagtctctgggcattccggtaaagagaatccgcagcctggtgattctgggggcagccatggtgactgcggctgttgtctccatgtgcggacagattggctggataggacttctcattccccacatggtgcgcatgatattcggaaatgacaaccgatcagtggttcccgccagcatggcatcgggagccctgtttatgcttatgattgataccgcggccaggtcggtcatggccacggaaatacctgtatccatattgacatctcttataggagcgccctgtttcatactgctcctcagaaagacaggaggtatccgtttatgatatttaaggtaaggaacggaggattcggctattcctcccatgaatgtatattaaaaaatgtaaacttctccctggatgaaccccaggtgctgtctgtcctgggagccaacggcgcaggaaagaccacgctgctcaaatgtatgctgggacttctggagtggaacacaggaggcacctttgtggacggtgtcaacataaaagacatcccatataaccagctgtggcagaagatagggtacgtaccccaggcaaaggcgtcggcctttgcctacagcacgcaggagatggtgattttaggaagaaatgcccatctgggcaccttcagacagcctaaaaagagggactgggaaatagcagaggcctgtatggaagagattggaataggatatcttaagggtaagctttgcagccacatcagcggcggagaactgcagatggtgctcattgccagggcgctggctgcaaatccgtccattctggtgttggatgagccggaatccaatctggacttcaggaaccagcttattgtgctggaggccattgaacgcctgtgcagggaaaagcatatatccgctgttgtgaacacccattatccggaacacgctttatccatatcccagaaagccctgctgctcaccgcccatgggaccaccctgttcggaccaacggatgagatactgagcgaggaacatctcaatgaggcgtttggggtggaggtcaggctgtatccgttaaccttaaggaacaggacgtatacctgtgtcctgcctttgggactgaaagaaagaatggaaagaggtgcatgatggagcgggtgattacgctggtggataaactggccaagtcccatatgctctccagggaggaatttagtttcctgctggataacataggggaggaggacacatatctgtacggaaaggccagggaggcagcccttgctaattacgggaacaagatatatgtccgtgggcttatggagtttaccaattattgtaaaaacgactgctactattgcggtatcaggagaagcaaccaaaaggcttcccgatacaggctgtcaccggagcagattatggagtgctgcagcattggctatgggctgggatttcggacctttgtgcttcagggcggcgaggatccgtggtttacggatgagaagattgcgtatctggtggagcgcataaaaaagcagtacccggactgtgcggttacgctgtctgtgggtgaaaaagggtacgatacctataagcgctggtttgatgcgggtgcagaccgttatctgcttcgccatgaaacagccaacccatgccattatgccagtctccatccgcctcagatgtcttctgagtacaggaaggaatgtctgcataacctgaaggccattggctaccagacaggatgcggaatcatggcaggctcaccgtatcagaccacggcccatatagcggaggacctggaatttatgcacggccttcagccggagatggtgggaatcggcccctttatcccccatcatgataccccctttaaggacaggcctgccggcaccctgcgccagacccttctgctgctggccattgtgcggctcatgctgccggatgtgcttctgcctgccaccacggctctgggcaccatagagccggatggaagggaacagggcgtgatggcaggggccaatgtggtaatgccgaatctgtcccccatggaagtgagaaaaaaatacatgctttacgacaataaaatcagcacaggcgtagaggcggcagccaatattaaagaattaaaacgaaggatggcgtccatagggtacgaagtggtcactgaccggggcgaccacaaaaaaaataaaagaagttcctgcccttaaagcctcataattactttgaaggttactttaagtataaattcctctgtttgacagatactacatttacgggcaacaaagaagataaatgacagaaagtaaaatggaggaattttgtttatgaaagctacaggaatagtcagaagaattgatgatctgggccgtgtggtcattccaaaggaaattcggaggaccctgaggctcagggaaggtacgccgttagagatattcacagacagggaaggagaaatcatccttaaaaaatactcgcctatgatggagctcacctcatttgccgtgcagtatgcagaggccatggcacagtccaccggccttttcgtatgcatcacggacagggaccaggtcatagctgtggcaggaggggccaaaaaggacctgctccagagaaatatcagccgtcagctggaacaggccatcaatgagcgcagcactgtcatcgctgccagggaagacaaggcatttatccagttagtggacgaggagctggagggaatcagcgcccaggtggtggcgcctattatctgcgaaggcgacgccattggcgccgtggcactcatgagccgtgagccaagggccaagttcggggacgccgagatgaagctggcatccacggctgccgggtttctgggacggcagatggaaggctaaccgttatatatggaattttcagaggtatcccggcacggggaagcgttatcgcagacctgtgccgggatgtttctgttttcaggcttttttcctggttacatttgtgttatactggcattgttaaaaagtgatatgtaatttgggaagggtaaataggtatacataagaacggtatgggaatcaatggtaaccgggggcgccaaaggaaggcgatactgattttggcagtccttgtgctggcggtccaggcgcctttgccgggccgggcatcacctgtcacgagggctgaacaggagaggcgcagggcagaggaggagaagtccagggcagagtctgaggcgcagcagctggaacggaagctggggcagtccagacagaaggaacaggccctggaggaagaattggtaaggatgctagcccttaaggatatactggaatccgatatggaagagctgaagacgcagattcagagggcagacagggattaccgccaggccgaggaaaaacggcagagacagtatgacatccttaaaaagaggattcagttcctgtatgaggagggggatatcacgtatctggatatccttttaaaggcaaagaacataggggatgtagtcagccagaccgaatatttcaggcagctctatgaatacgaccaggaaattatacagagatatgagaagctaaagcaggaagctgccgggaaaaaggaactgctggaggagaaacaatcccagcttgaggtcatggaagaggaaaatgagtcccagcaaaaggaactggaaggattcattgcggcgaggcaaaaggagagcagcggttttgcccttgaactggaggcggcccaggcccgtgcagcccaggctgccggggaagtgataaggaaaacagaagaaatacgtatcctcagggcaaggcaggaggaagagcgtatcaggcaggagaaagagcgcgtcaggcaggagcaggaaagtgcaggacaggaatcaggggccgcaggacgggagccaggggccacaggacgggagccaggaggtgcaggacaggaatcaggaagcgcaggcacggcacaagacagtgcaggtacagccggcggccggtcagtgaaaagcataggcggcactgaattcggcagaaatgtggcagactatgccctgcagtttgtaggcaatccctatgtatacggaggtacaagccttaccggcggaacagactgttccggttatacccagtcggtataccggcatttcggcgtcagcattcccaggacgtcaggggaacaggcgggatttggcagggagataccgtatgaggatatggagccaggtgatctggtctgctattccggccatgtggccatgtatatcggaggaggccgcattgtacacgccagttccagaaaagaaggcattaaggtgagcaatgatccggcctaccggaccattgtatccatacgcaggccatggcagtaatggggataaaggataaggggaggtttatgatggggattaggaacaggttcatatatttcgcaggcagggcagcggccggcgtatgtgctgcgctgggaatatggtggtcttgcgccatgacttcttttgcagacgaggccatcaagtcagttaccatagccgtcacctcatccgtggagatggggagcagcggaagcgtgtctgccacggcggacagcaccaagtatcatgtggtgtcctgcgagtttatcaacggaaagacatcctggaaggcgggggaaatcccgcgcatatcaattgagctggcggctgaggaggattactatttcggaagcatcagttcctccaacgcgcatatacggggggccgagtatgtgtcatccaagaaaagcgatgcaaagcgcagtctcaccattactgccaaattaaaaggggtcaagggtactctggaccaggtggaggaggcttattgggaagaaacgcctttgggaaaagccaggtggtctaaggtagatggggcttcctcctacgaggtaaagctgttctgcgacgagagcatggtctaccatgtgcccaggaccaattcggtcagctatgatttttttccctatatgacggaagaaggggattactatttcaaggtgagggcagtggcaaagaccgagtctgagtctgattacctgaaagcaggcggatggacggagtctgacaaccagcaaatcaccagaaaggatgcccaggcagcggataagcgggctgtatcccagggaaagggaaccgccggtgtcagcgtgaaggacggaacaggccccaatgcccaggctccggggtgggcccaggacggaaacggctggtggtacaggaaccaggacggaagctatccggtgggctgctggcaggagattggaggaaagtggtatctttttgacataaacggatacatgcttacgggctggcagtggaagaacgacagggaatactacctgacatccaatggggacatggttacgggctggctccagttcaaccgcatttggtattacctggacccggagaagggaaaactgacagggcagtggctgcagcaggggaatgactggtattatctgaatccggacggcagtatggctgccgggtggctgcaatggcagggcaactggtactatctggatccgtcaagcgggcagatggtgcgggataaagccgtggatcagcattatgtgaatcaggcggggatatgggtcccgtagccggcagaaggaggaaatgatgatgtatggatggaagaaggcggccgcggcattgggaatctgggcggtcctcacagctgtatttcctgctgtttccatagcagcagtcaagacagagacgaggacacccatcaccagcgtatcgctgaaggtgcgttccgatgtacaggcggattatgagctcaatgaggccacggtgtatgccaccacggacagcagcctgtataccatcggcgcttataaatgggctgccaagaataataaggattactgggaaccgggggatgaacccaaagtgcagattgagatacatgccagaagcggctactatttcaacaggaccacagggccaagcaaattccagattgacggggcaacctataagtcggtgaaaaggaccaataatgacgagacactgcttcttacagtcctgctgactcctgcttccggcacactggagataccggatacagctgagtggatgggatacccgccgggaaaggctacctgggcccaggtgccctatgccggcgcctacgagctgaagctttaccggaatggacagatggtccagggcataccaaaggtgattgccacgaattatgatttttaccccctgatgaccgtagcaggaacctatcagtttcgcgtcagggccatacccaaggacacggaggagacagcttacatcaccagcagcgactgggtgtattccgatgagctggatatagatgcggatgaggtctgcactctgagcggaggcgcggtgggcggtccggacaaggctgatgcgctgacgccttcccagctgggatggattaaggatgatgagggctggtggtataggaacacagacggcacctatcccatcggtacatggaagaacattgacggcaggtggtatctctttgatttcagcggatatatgctgacgggctggcagcagaaggatggcaattactatttcctggatatgaatggaattatgcagacaggctggcttcaggacagtcggaaatggtattatctgggaaatgatggaatcatgtataagggatggcttacagccggagacggcatgtacttctttgaccaggacggaagcatgcatacgggctggctgctggacggcggcaattggtattatatgagtccggaaaatgggcgtatggttaagaatgcttatatagagggacggtacctggatggttccgggatttggcataattaatgacaggcagaacccgtagaagggctgcagctgagctgcgtcagaggtcttgtaagaccaaaatcatatatggcggaaatcagatacggcagaagcagaatacagcagaaacaggatatatcagaagcagaatacagcataatatagttcattaagttacccaatcagaaaagagcagcagcaggtttacaaagaaacatcctgaggctgcttttttgtcccccatccattatatgggaaaaattaccaacctccggtttttcctataaacagagtcaaaatggttacaaaacagtttctaaaacatttatttttgttgacggagtgactgaatggggatatacttaaaatattggataattgtgtaaataacgtgggttaaacggggggaagattatgtttatcataccggttacaaggatggagggagtaggagacttaactgacttaaaaaaggacagcacggttaaggcgggtccggagaaacgctttgacagtgtgctgaaggaggcagtcagagaggcggaccaggccattaaggatacccagattatggatatgaagcttgcgtcaggacaggtggacaacctgcataccgcgctgatacaggcggaaaagacagcagcagcagtggaattcactacacagattactactaaggcggtgaatgcctataatcagattatgggtatgcaggtctaatactggatgaaggatgttacaattgaatcatggggataaaggataagataaaaccaggagccggcggaaacggcgtcataggacgattcctgggaagcggcagaagaaaagccgtggcagcgggggcggtaggggcagtagtaatagccttggcagccagtattatgttaaacagaggaaataccggcagctatgtaacattgtttccagggatatccagagaagagaataacgaaattctggcagtgctgggcggaagaggcgtggctgccaaaaggaatgatgagggcgaagtgacggttccggaggatcagttaggcgacatcatgatagagatgtcggagctgggctatccgaaaacggcgcttccttttgatattttctcggataatatgggttttactaccacggagtttgagaaacggcagtacctccttatgaatctccaggaccgcctggaacgcaccctgaaggatatgacaggcattaagaatgccattgtcacattgaatgtaccggatgagagcgcttatgtatgggaggacggggattccggcagtacaggctctgtctctctgactttaatgccttcctatgatttgtcaccggagaaggtatcggctatcaagaatctggtggcggacagcgtaccgcgcctggcgcctgagcgtgtgactgtggtcaacgcggagaccatgcaggagatggtgtcggatgacatagggaacacggcttacggcctgaaccgtctggattttgaggccaaggtggaggaacgcctgcagaacaaaatcaagaatgtgctgacactggcctactctccggataagatccgggtatctgccacggtcgtcatagactatgacaagatgataaccgagaatctggaatacgaaccccaggagaacggacagggcgtggtggaccattaccgggaaagcagaggcgtggcaggcggccagattggggcagggggtattgccggggaagagaacaacacggacatacctgcttacggcactgccggaacaggcggtacggcccaggggaccggggattattacagggatgtggattaccttgtaagctacataaagaaacagattgaaaaggacaatgtcaaacttcagaaggcaactgtggccattacggtcaacgacgataacctgacagagtccaaaaagcagcagttaattgacgcggcgtccaaggcggccaatattgcgccggaggatatcgtggtatccagcttccgcgaagtgccgaaggagactgctccagccaagccggcactgcctgtgcaggcgcctgtggacacgggaattgattaccggaccatagccattgcggccggagccggaattcttctgttccttctgatgctgttcctgatttttggccgcaggcgcaggagacagatgaaggaggaccaggagctgtttgctccctttgagggagaggtgccgccgactgcggatatggaagagcgggcggaggaggcagcggttcagaatgatttgggccgcatgcaggtgaatccggaggacccggtggagcaggtccgttcctttgcacagatgaatccggaaatcattgcatccatgataagttcatggctgaaggaggataaaaaataagatgcctgcagaagagagaaggccggcagagaaagccgcggctgtcatatccatattgggaagcgaacgggcatctgaggtgttccggtatctcactgaaaatgaggtggaacagctgtccatggaaatcacccgtcttccccgtctggctgaagatgaattagaggatattgccaaggatttttataactgctgcgtgacagaaaaggtcataaccgagggcggacgtgattatgccaaggaggttctggaaaaggcgtttgggcagcagcaggccaggaacctgatggaccgggtgagcaaggccctgaaaaccaaagcattcagttttatcagaaaagtggactataagaccctgatggcagccatacagaatgagcatccccagacactggcgctcatcctgtcctatgccacgccggaacaggcgtcgaagatcattgcaaatctttcccaggataccagggtggatgtggtggagcgaatcgccaacatggaccgggccctgcccatggctatcaagatagccgaggaggtcctggagaagaaaatcggatcctcctcatccgaggaaaccatggaggtgggaggtctcaattacatagcggacgtgatgaaccatgtggaccgcagcacggagcgggacatatttgacgagctgaatatgaaaaatccgcagctggccgaggacgtgcgcaagctcatgtttgtattcgaggacatcgcctatctggaccctctgtccgtacagcggttcctgcgtgagattgattccaaggatttgtctgtggcccttaaggttgccaacagggatgtgacggcaactatattctccaatatgtccaaccgtatgcgcgaatctatacagagcgatatggaataccttcataatatacgtatgagcgatgtggaggaggcccagcagaggattgtggctgttatcaggcggctggaggaggaaggcgagattgtgatttccaaggatggaaaggatgagataattgtctagggtattgaagcagggacagaccataaccggaagcgccagggtcagggtgtaccagcctgagccgggaatgccgggacaggctggtaccggggaaagcacagacgggacagggaatcaggaaacggacagcgccggggccggaggacaggacacagccggaaaacggtatgccctcatatcagaagaaaagcgtaagattctggaacacgccaggaagcttttctttgacagggtcactaaaatatacggaaacgggcaaaaggccctggataatgtgagtcttaaggttggcaggggggagtttgtgtttctggagggagacagcggcgcgggaaagaccactatgctggagctgattttaaaagagaccgatcccacccaggggaatatacaggtcaatgggattgagctggcaggcctcagagaacgtcagatttaccagtaccgccgttatatagggatggtatttcaggatttccggctcttttctgattttacggtatatgaaaatgtggcatttgcccagcgggtggtggaggcggattacaaaaccatgaagcgcagggttatggaagtgctgaatcaggtggggcttggttccaaggcaaagtactacccggaccagctctccggcggggaaaaacagcgtaccgccattgccagggccattgtgaaccggccggtgcttcttctggccgatgagcctacgggcaatctggaccagaagaacgcagaggatatcatgcgcctgctggagcggattaacggccaggggacaacggtgctggtggtttcccataaccaggagctggtaaggagcatgcacagaaggcaggtggtgctgcgcagaggacaggtggccagggaccttgcaagggaggcagcggcatatgggtattaggacattgctctacctgttccgtctggggcttaaaaatctgtggcatcacagagtgtatacagcggcgtctgtcattaccatgtcggcctgtatttttctgttcggcctgttttatctggcggcagccaatgtggacagcatggtaaaaaagacagagcaggaagtctatgtggctgtgttttttgatgagggaatactgccggagcgggtggaagagataggaaacctgattcagagccgtccggaagtgctgcggaccgtgtatgtgtcggcagacgaggcctggagcgggtttaaagagaaatattacgagaatgcggaggcattggacggaatctttgaaacggataatccgctggcttccagtgggaactaccaggtatatattgaccggataggcagccaggaaggctttgtggagtatgtgcagagcattgaaggcgtgaggaaaaccacccattcagcggatacggtcatggcgcttttaaagctgcgccagggggcggcccgcctgattgcgggaagcgcggtgctgctggtactgatatcagtgctgctgattcacaataccctgtctgtgggcattgaggcccaaaaggagaaaacaagggtcatgcgccttataggagcgcgggaaggctttgtgaaaattccttttatggcggaggctgttgttatgggagcggcaggagtggttatcccgctgattcttctgatgtggctgtaccgttggggacttgcctttgccgtttccggtctgaatggtctgggcagcctgagaggactggagtccgggcttctcaccgaggcccaggtatttcccggacttatccgtgcgtccgtactcctggggatttttacaggggttgtgggaggattgtctgttatggggaaattgaagcgcaggaagaaagagcgttgatgtgtgcggtttcataataatggggatttaaaataataaagcaggatttccgccctttggaagggagggaaatcctgctttattattacgttttatttgggcctgctgatattgcgctgcggcggaaattacggggatcaattccggctttccgtattctgtctcccggcctcatcctgccgtgccagccactccgcaaaatacggtttaatgacgctgaagggagccgggcctatatccagaaggaaacggttgaattccatgttggtatagcggctgccaagggttttcttggcctcgcgctgcatgcccaggatttccaggtagcccacataatactccaggtaattggccggattctccgcaatgtcataatagatggtggtaatgacagaggaatcgctgatgcggaagtagtggtttaaatagtcctccacctgcttgatatcccagccctcatagtggatattcacatccagaatagcgtacagggcaagggtgaaggcggcattgtgctggagcagctctcccaggtccgggtccagtccgttgttcaggctgtaggaatagtattccacataggtggcccagccttctgaatagctgttgaagctcaggagcttacgcaggttgcaggtgttatgtttgttgaagtagagggtttggtacatgtggccgggataaccctcatgggccagggtggagtacaggttcctggcggtattggtgcttccgttgttgatgtagatggaattgtcctgggggcggtcaatgggcacggtcaggtagaaggccgggctcagggtggcctccagggcagcgggcacatttttaatgctgcatgtgtaatcctcgatggccgggaaatcctttgcgcactgtttcctcaggtcctccagaatctggttgggatcggtgagggcgaaggagtaggagtacagtttttttgccagggtgggattttcggtcagcagctcatccatggcagtcaggtcatccatcatctgatcgctcatggcctttttcagggcaggaatatcctgataggaagtgccggtatatgcgttcaccaggtactggtaatatttcttgccctgggggaagtaatacagccctttatcattggttccggtgcctttcaggggagtcagcccctcgatcagcttctggtatgcgggcacaaagtgttcgtcaatggcagtatggttcctggcaatgaaatcctccttttcctgctttgtcagtccctccacctgctccagacgctccgcaaatgtttccgccatgaagctgtggtccgcgtccagaagataggcgttgcaggaattgaggatacggtcgatgaccgtgtcgcacagccccagaccggcatcggttttttctttctcaaaggcaatgatgctgtcatagtaggtgtcaatggaggacaggagggaaaggtaatcctccacatcctgtttactgtaaaatacatactcggacagaagtatgggaagctgcgcctgtatgcccagggaggaggaaaggggctggtcgtagagctccagtccttcactgtccagcatggtatttaaataggatgacaggatgttgtatgtgagcagctggtcctcacggagcaggcggctgtctatttcatttaattgtactttcagggattttgcatcattaagagcctgtttactgtcctccagggatacggttcccagggttttatcgtagtcagtgatgccgtaggcggccggattggccagggtgtagtgaagcgtgataagggaattgtcaacttcgtccaggaacaggtcgttggtcagctggtcaaaggacgcctgggcatcaatggttttcttctcatattgttcataggactgggtattttcctgggcagcggattcctttgccagaggagcggatgcctgaggacgcgcaggcgccacgcatccggctgtcaggcagataaccagaagcagggataaaagatattgtaaaaatatggtttttcgttgtctcattctaaacaaatcctccattggggtgtctgctgcatttttattacgacattatatagtatatgagcggaaattacaacttatgagccgtgaaaaaactggcagggccttccaaagagggaaaaaacagggggcacgtcttgacgaacatgggggaaacgcttatacttaaaactattaaaataagcggattgggcgctgcggccgccggagcatatttatgaactgctctgcccccggctctttgtttccgctcagaaaaagagggaattaatcatatgtgtcaggattgtaaaaagccatattatattaccacggccattgcctatgcttccggcaagccgcatatcggcaatacctatgaaatcattctggctgacagcatagccagatataagagggagcagggatatgacgtgtttttccagaccggtacggacgagcatggacagaagattgaagaaaaggctgaggcagcaggtgtgactccccaggagttcgtggacaaggcagcagctgagataaagcggatttgggatttgatgaacacatcctatgataagtttatccgcaccacggaccaggaccatgaggcccaggtgcagaagattttcaagaagctttacgaccagggcgatatctataagggatattacgagggactgtactgcactccctgcgagtcctttttcaccgagtcccagctggtggacggcaagtgtccggactgcggacgcgaggtaaaaccagccaaggaggaggcgtatttcttccgtatgagcaagtacgctcccaggctgatcgagtatatcaatgagcatccggagttcatccagcccgtatccaggaagaatgagatgatgaacaacttccttcttccgggacttcaggatttatgcgtgtccaggaccaccttcagctggggcatccctgttgattttgacccgaagcatgtgacctatgtatggctggatgccctgaccaactatatcaccggtattggttatgattgtgacggcagcagtacagaccagtttaagaagtactggcccgctgaccttcatctgattggcaaggatatcatccgattccacaccatctactggcccattttcctgatggccctggatgtgccccttcccaagcaggtatttggccatccatggctgctgcagggcgacggtaagatgagcaagtccaagggcaacgtgctctacgcagataccctggtggatttctttggcgtggacgcggtgcgctatttcgtgcttcatgagatgccgtttgacaatgacggcgtcatttcctgggagctgatggtggagcgtatgaactccgacctggctaatatactgggcaacctggtaaaccgcaccatctccatgagcaacaagtattttgacggcgtggtctgtgacaagggtgtctgcggggaagcggacgaggatcttaagaaggtagtgctggaggaagtgaagaaggctgatgccaagatggagcagctgcgtgtggcagacgccatgacggaaatctttaatatcttcagaagatgcaacaagtatattgatgagacaacaccctggacactggctaaggatgagagccagaaggacaggcttgccaccgtgctctataacctgacagaggccattgccatcggagcatcccttctgtactcctttatgccggagacagctgaaaaaatcctggcgcagattcatacaggcaagcgtgaactgtcccagatggatgcctttggattatatccaaacggacaaaaggtgacggataagccggagattctctttgcccgcatggacatcaaggaagtgctggagaaggtggaagccatgcatggggctgaggcagcagaccataaacaggcaggcggccaggacggatcctctgataatgcagaggacagcggcattgacctggaggccaagccggagataacctatgatgattttgcgaagcttcagttccaggtgggggaaatcatcaagtgcgaggcagttcccaaatccaagaagctcctttgctcccaggtaaagattggaagccaggtgcgccagattttaagcggcattaaggcttactactctccagaagagatggtgggcaaaaaggttatggtagtgaccaacttaaagccggccaagctggcaggcatggtgtctgagggtatgattctctgcgcagaggacgcagagggcagcctggcacttatgacgccggagaaaagtatgccggcaggagccgaaatctgctgatggttcggttagctgtgagacattaaaaagaatatgatgaataccggacaggaaccgtggaaagcatgtgctttttatggctgcccggaaggcaggagcgggcggtgatgacctgctcctgtttttaaatcaggcgtattttgcatgataaacaatggaggggattatgaaaatactgagcataacagcccagaaaccccacagcacggggagcggtgtttatcttaccggtttggtaaaggggtttgccgcactggggcatgaacaggccgtggtggcaggggtctatgaggaggacgagatgcattttcccgaagggacccgggtctatccggtatattacaaaacagaaagcctgccctttcccatcgcgggtatgtcggatgagatgccttatgagagcaccatatacagccggatgacagaggatatggtggacgcattcaaaagggtatttctggagaaaacaagggaggcggtggaatgcttccggccggatttgattctgtgccatcatctgtatctgcttacagcagcggtgcgggaggcatttccccaatataaaacagcagccatatgccatggcacaggcctgcgccaggtaaagaaaaacagccttgaacgggattatatcctggctcacataaaggaattggatatggtgttctgcctacacagggaacagagggaagaaatcagccggatatacggcgtgccgggagagcggctggaagtgattggaagcggatttgatgattccattttccgctatatgccggttcaaaaggagaatggggtcaagcggctgatttacgccggaaagctgtctgagaagaaaggtgtcatgagtctgctgcggagccttacgtatctggaacagctgcaaagaaaggatggggagcagcaaggacagggcatagggcagccagcagctcctatgaaaatagaggtatggctggccgggggatatggaaaccagctggagtatgaaaccattaagaagctggcggaccagtccccttacccggtgaaatttcttggaaggctggatcagccccagctggcagaacggatgaatcaggcggatgttttcgtgctcccgtccttttacgagggtctgcctcttgtggtgatagaggctctggcctgcggtttgcaggtggtctgtacagacttaccgggggtcaggccctggctggaggaaaatatcggaacgtgtgccgtgagatttgtgtccctgccagccattgtaaatgcggatgaaccagttgaacaggagcttccacagtttgaacggcgcctggctgaggcgatagatgaaagcctgaaagcggatggcagcaggcagggagcggatagcagcaggcaggaagcggatggcagcaggcaggaagcggatggcagcaggcaggaagcggatagcagcaggttgggaccggatggcaggccgccggaaacaccgggcggagaaagtttggccgcagcgggtccgtctatagcatccccgccgcccgatttgagccgcatatcctggacaggcataagcaaaaagatattaggatcctgcaatcttatataaatcccccaaaatctggatgaaaatgggagaaccatgccctctttcctggaaaaatcgacctgaagtgggagaaacttgcaattttcgccattttggagtatgatgaaaggaaattaaaacatgagggggctataaagcccgaaagagggtacgatatgggtagaggacgcagccgcgggccatacggcggccgccgacaggggcttacgggaaaccagctgaagattctgggaattgtggcaattctaattgataatattggagcagtggtgattcagggagggattcttcatggaacagacagtgctctttatcatgcagtgctgctgacgccttccgggcattactgggtgatagcaggacaggtctgccgttatgtggggagactgggatttcctatcctggcatatctcacggcagaggaatttgtgcgcaccagggaccgccggtggtacgccgtcaggatgctcctgtttgccctgttgtctgaagtgccctttgatttggctgtgtaccataccatgtattatccccactatcagaatatgatgtttaccctgtttgccggggtgctggttatggctgtcatggagtccacccagaatccgtgtttgaaggcaggggctctggcagcaggatgcgcgctgtcatgggtgctgcagtttgattataatgtggtgggagtcctgttcatagctgccatgtactggttccgccgcagtgatacggcccaggtggttgcgggagtggcaatctgcgcagtggagagcatcagctgctattgtgtgtcagccttgtcttttgcgcctattgtattgtataatggaaggcggggggcatttcagcttaaatatatgttctacgtgttttacccggtacattttctggttctgtacggtgtgagcatgtggattgcaaaaggagtttaaaatcatgatatttgacacacatgcccattatgatgatgaggcatttgacggggaccggccggaacttctgggacgtttgaaagaagccggcgtcggtgcggttatgaatgtagccgccagcctggagagctgccgaagtaccctgaagctggccgaagcctatgactggatatacggggccatgggagtccatcccagtgagacgggggagctggaccaggagggcctacagtggattaaggaacagtgtggccgccggaagataaaggccgtgggcgaaatcggcctggattactactgggaggaaccggcccacgatatacagaaaaaatggtttgaggcacagatggatttggccaggcaggttaagcttccagtcatcatccacagcagggatgccgcaaaggataccctggatatgatgaaggcggctaaggccggggatatcggaggcgtcgtccactgcttttcctacaccagggaaatggccagggagtacctgaacatgggatttttccttggaatcggaggtgtccttaccttcaacaatgcaaggaagctgaaagaggtggtggagtatatacctctggagtccattgtattggagacagactgtccctatctggcgccggttcccaaccgtggaaagagaaactcatccctcaatcttccctatgtagtggaggctgtcagccagcttaagggagtggacccggaaaccgttgtgaaggtcacctgggaaaatggaaaaaggctctaccggctgtaggcagcccggttatgggaaacagagttgacaaatagacaaaaagcgctgtagtgtacgatatacagcgcttcttttttgactgttcttttgcccaggcattgacttttggacgggaatccattactcttaaaagagggccgaatccggtccgcagaaaggaattctaatacatggcaaatttgggtgatccgaaaaataccattgaaatcatacagaaatatcagttcgcattccaaaagaaatttggtcagaattttctcatagatacccacgtgctggacaaaatcataagtgccgcagggattaccggggatgactgcgtgctggaaataggaccgggcattggaaccatgacccagtacctggcggagcatgcaggaaaagtggttgcagtggagattgacaccaatcttctgcccatactggacgagaccttaaagggctattccaatgtgacggttatcaacagtgatatcctgaaattagacatgaaccagttggtggacgagtataatggtggaaggcctatcaaggtggtggccaacctcccatattacatcaccacgcccattatcatgggattgtttgagagcaatgtgcccattgacaatatcactgttatggtgcagaaggaggtggcggaccggatgcaggtgggacccggctccaaggactacggcgccttgtccctggcagtgcagtactatgcaaagccttatatcgtggcaaatgtaccgcccaactgctttattccgcgccccaatgtgggatccgcggttatccgtctgacaaggtataaggaaccgccggtacaggtggacgagccaggtgtcatgttccggcttataagggcctcgtttaatcagcgcaggaagacgctgcagaacggattaaataactcgccggaggttccgtatacaaaggagcagatagcggctgccattgagagcctgggcgttcctgcttctgtcaggggggaagcattgacgctggagcagttcgccggcttgtccaattattttacccgcacagcgggaaatggggcttaaggttcggaatatgatgccaggaatacaaaaacggggtccgtggtgtatttcacggggataaaggggaataatcctggaaggacaattatctgaatcatcagagaaattatatataaaacagaaaggaaggtaagtcgatgaagaaaaaagtgggtaaaatcctgacagctgcggcagcaggagcggcagtgggcgtggcagtgaagaagctgcaggacagccggaaggaaaaggaagatgagaggattgccgccattgaggaagcggtgatgaataaccgggattatggcgacaggaaagcttatctggtaggcggaggcctggccaccctggctgctgccgcgtatctgatccgggactgcaggttccctgccaaccagataacggtttacgagggcatgcacatacttgggggaagcaatgacggtatcggtacgccggagcagggctttgtatgccgcggcggacgtatgctcaatgaggagacctatgagaacttctgggagctttttggctccattccatccctgcgccagcccggacgcagcgttacggaagaaattctggagtttgaccatgcccatcctacctgcgccaaggcaaggctggtggataaggacggcaacattctggatgtgaaatccatgggttttaaccaggctgaccggatggcccttctgaagctgctgatgacagatgagaaaaagctggacaacctgaccatccaggactggtttaaggaaacaccccatatattcgagaccaatttctggtatatgtggcagaccacctttgcattccagaagtacagcagcctgtttgagttcagacggtatatgaaccgcatgatttttgagttcagccgtatcgaaaccctggagggagttaccagaacgcccttaaaccagtatgacagcgtgattcgtcctctggagacttatctgaggaaggccggagtcaacttccgtgagaactgcgaagtgacggatatagattttgcggatggccccggaattacggtaaagaccctgtatctgaaaaagaaagtggagagcacagatgactcaggcgaggaatcagacgctccggccggtccttcctatgtgacggaggaggtccagctaaataagagcgatatctgtatcatgaccaatgcgtgcatgacggacagcgctaccctgggaagcctttacaaacccgcgcccgcgcctgagaagaagccgatcagcggtgaactctgggccaaggtggccggaaagaagccgggtctgggaaatccggagccattctttaccaagcctgaggagacaaactggctcagctttactgttacctgcaaaggcgatgatattttaaagaccattgagaattttaccggtaatgtacctggcagcggcgctctgatgacctttaaggattccagctggcttatgagcagcgtggttgcggcgcagcctcattttgttaaccagcccgccgaccagactattttctggggatatggactgcacacagaggccattggcgattatgtaaagaagcctatgaaggattgtaccggccaggagctgttaaatgaatatctccatcatcttcatattccggaggataggattgcggaactgatgaagacggttatcaatgtgattccctgctatatgccttatgtggatgcacagtttgagccgcgcaagatgagcgacaggccgccagtgattccggcaggttccaccaactttgcaatggtgagccagtttgtggagattccggaggacatggtatttaccgaggaatattcggtacgcgctgcgcggattgcagtttacggccttttggatgtaaagaaaaagatttgcccggtgacgccttacaacaggcagcctaagattcttttgaaggcgcttaagaaatcatatctgtagagggacatatccatcatatggttaaatatcgggccggcttctgccggcccggacttttggaatacatacaggcggagtacatacaggcggagtacatacaggcggagtacatacaggataggagacaataccaatgatatttataggaggaatcagtcaggggcagaaaatactggattatgtaaagactgtcatatgtgaccggtgcggcggatacgggcgataccaggtttacatgacctatatgtatttcagctttttctttattcccctgttcaagtggaataagagattttatgtaaaaatgtcctgctgtgatgctgtctatgagctggacccggaggtgggaaaggcgctgcttcacggccagcaggcagatataaaaagttccgacctgacgttagttcaggaggggcgccgcaggggctattacgacagcggaacctataagacctggaaaaaatgcggaaaatgcggatatgagacagaagaggattttgagtactgtcctaaatgcggcaggagactgtgacggacggcggcgcacagaccgcagctggagagaattcagcatcccctgctgatatgaggccgaaccaagaatttttttaaacttctacctagccatggctcttccggtatagtataatggaattagcctttacgggcatctaatatttggagaggtgttggatgctgcaatggctggcagccattgcataagagaaaggatgggaaaatgacggaaaatcagaagatggatttgatcctgcagaagttaggtgggatcgaaggaggccttgcctcggtaggagaagatgtgcggtcgctgcagggagacgtgcagacgctcaaaggagacgtgcagacactcaaaggagatgttcagacgctcaaaggagacgtgcagacgctcaaagaggatgtacagatgctcaaagacagggtaaccaacatagagattaccctggagaatgagaccaacaggaatatccagctgatagcagagggccatttgaacctggatcgaaagctggatgaagcgttaaaggaattacagcctaataccatgtatcatttaaaagtgaatcacctggatggcgaggtcaccaagatgaagcgtatgttgaatatggcataaaacggataccgctatggaatgccgcagttcagttttcacggttcaaatttcataacaatttcagcaaactagagaggattttgcaaggcagtaattagctgcattgcaaaatcctttttgcgtttttggccttccatataagctgtatccttagccgcgtacgggaaggaccaggaaactctgcctgtttttacctttattttacgcgaacctgcttttggattttacctggacaatttagaatctataagtagatttgggagagagaaaggaacggaaatggcggatatttcactggtaaatgtatgtaaaacctataaagggggccaaaatgcggtcaaggattttaatttggatatcagggaccgggagctgattatttttgtgggaccgtcaggctgcggaaaatccactacactgagaatgattgcgggacttgaggatatttcctcaggggaattatggatggatgactgcctgatgaacatggtcgaacctaaaaaccggaatctgtccatggtatttcagaattatgccttatatccccatatgacggtgtatgagaacatggccttcggactcagggtgcgcaggaccgcgcccggtgaaattgatgccagagtaagggaggcagcccgaattctggaaatcagccatctgctggaccgcaggccggctgcattatcaggaggacagaagcagagggttgcaatcggaagcgtgattgtgagaaagccaaaggcttatcttatggacgaacccctgtccaatctggatgccaagctgagggcacagatgcgggtggaaatagcaaagcttcacaaacagcttaacgccaccatcatatatgtgacccatgaccaggtggaggccatgactctgggtacccgcattgttgttatgaaccagggaatgatacagcaggtagcgcctcccgcagagctttaccggaatcctgtaaataaatttgtggcgggattcattggttcccccactatgaattttctggatgtggatgtgctggaagaggatggtacagtctggcttctggggcagggatggcggcttcccctggaaggataccaggccaggaaattaaaagaaaaagggtttgcgggaaaacgggtaaccctgggtatccggccggaagaccttcatcaggaagaatgcagccggaaaaacggttccgatggtttgaacggaaatgacagcgggtggattggagtttacataagtgtaagggaaatgctgggaggcgaggtgctgcttcacggcaatacaggggatacgggccggctgtcggccaggatgccggcgtcctgccgggtgaagccgggagaattcctgcgcctttacgtggatatgcctcagattaagctgtttgatatacagtcagaagaaaatattttatttgattaggagacagtgatgaaatcagattcattattaaaaaaggcagggccctatggatatattttaccggctctcctggtgtttgccgtattcctgttttacccgtttttcaagaccatttacctgagtctttataagacaaataaaatggggcaggccaagctgtttgtgggactgggaaattatatggagctgtttcagtcggaatcattttataacagtctggcagtaacccttctgttcgtggcaatcgtggtggcggggagcatggccctgggactcctggcagctgtcctgtgcaataaggcatttccgggaatccgtatattcagcacggcttatgcgctgcccatggccattgcgtccagttccgcagccatgatatttaaaatcatgcttcacccttccatcggtattgtaaacaagctgctgggacttgatatcaattggattaacgaccccaaatacgcgctcatatgtgtggccctgctgacagcctggcttaacagcggaattaacttcctgtatttcagcgccgggctcagcaatattgatgagactatctacgagagagcatccgtggatggggccaacgggattcagaaatttttccggctgacactgccgggtctcagcccaatcatgttttataccatcgtagtaaatatcatccaggcattccagtcctttggccaggtgaagattctgacccagggcggaccgggggaatccacaaacctgattgtgtattccatttacagggatgcgttttttaactacaggtttggcagcgcggcggcacagtccgtcatactgtttgccatcatcatggtcatgacgcttatgatgtttaaggcagaaaagaaaggagtcagctattaatggaacagacaatggtcataaagggacgcaaaagagtcagccgcgaggaaatcattaaagtacaggagaaagccaacagaaaagccatgactgtaaggagagtcaggaccggagccctgattgcagccaatgtgctggtatcccttttcgttcttctgccgctgttatatgcggtcagcgtggcatttatgccgcccggcgaattgtttaccacggaaatgaatctggtgcccaggcagcctacatgggacaatttcaggcaggccctggtgaaaataccgctggtgcggtttgtgtgcaactcctttatcacagccgggctgattacagcgggacagattatttcatgttctttggctgcattttccttctcctttctggagtttaagggtaaaaatgcactttttatgctggtaatggccaccatgatgattccgggagaggccaccatcatatcaaattatctgacggtgagccggtggaactggctggattcctaccaggtgctcattgtgccctatcttacgtcagcaatgggaatctttctgttccggcagttttataaatcatttcccatctctctgtatgagtcggcaaagattgacggctgcggaaatctcaggttcattttccgcatcctgcttccgcttaccaagtcggccataggagccatggcggtgtatacctttatcaatgcctggaacatgtatatgtggcctttgctggtgaccggctccaatgaaatgagaaccgtgcaaattggtatcagcatgttaaacagcgtggacgcccagtccattactttgatgatcgcaggcgtggtcatgattatcctgccctccatttccatcttcatattggggcagaagcagctgatacgggggatgttctcaggcgctgtgaagggttagaaacacccgaaaagggattacagaagtaaataaaagaagaaaaagaaataagaaaatgaaataagaataaaaaataaacggaggaataacaattatgaaaaagagattaatcggttatgctgcagccttactggcagtatccatgctggcagggtgcggagcgccggcagcagacacgggcgctgcggctgacccgggttcccaggcaggtacatcccaggcaggtacatcccagtcaggtacatcccaggcagacgcttcccagacaggcacatcccagacagatgcatcccaaagtgcaggcgcagagggcgcttccatcaccttctggcattccatgggcggagtgaacggagaggcattggagtatctggtaaataagtttaattcagaaaacaccatgggaatccaggtggaggcccagtatcagggagagtatgacgatgccatcaataaactgaaaagcgcccagattggcaatatgggtgcggatttggtacagatttacgacattggaaccaggttcatgattgattccgggtgggtggtgcccatgcaggagttaatcgacgcggacggatgggataaaacacagattgaacctaacatcgcggcgtattatactgtaggtgacaccttatattccatgccctttaactcatccacgcctttgctgtactacaacaaggatatgtttgacaaggcaggcattacacaggcgcctggaagccttggggagatcggccggattgccgatgatttggtgaacaagggcggggcaggagaacctatttccctgagcatttacggttggttttttgaacagtttacctgcaagcagggactgaattatgtaaacaacggaaatggacgtgaggcagctgccacagcggttgaatttgaccagaacggagctggggcaaagacactggcggcctggaaggaactgtacgacaagggctacgcgcccaatgtgggcagaggcggcgatgcgggactggcagatttcagctccggcaggtcggccatgacccttggatccactgcctccttaaagcagattctggaagatgtaaatggcaagtttgaggtgggaaccgcttatttccccatggtcagtgaaagcgataaaggcggagtgtctattggaggcgcctctctctgggccctgaacaatgaggatgaggctaagaaggccgccacatgggagtttgttaagttccttgtttcaccggagagccaggcttactggaacgcccagacaggatatttccctgtgactgtcaaggctcatgaggaacctgtattcagggagaatctggaaaaatatccccagttcggcactgccattgaccagcttcatgattccgctccgcagtcagcaggcgccctgctcagcgtatttcctgaggcaaggcaggtggttgaaatggagatagagaacatgcttaacaacggaaccagcccggaggaggctgcatctgagatggcgcagcagattaataaggcaatcggggaatataacctgctcaatgaatgataatcatggattggagggtatactgagtatgaagacacaggtttgggcccacagaggcgcgtcggcttacgcgccggaaaatacgctggaggcattccggctggcagcggaaatgggagccgacggggtggagctggatgtccagttaagcagggacggtgagctagtggtggcccatgatgagaccatcgacagggtgagcagcggcacagggtatataaaggattataccctggcccagcttaagaaactgtcctttaacaggctgtttcccaagtttaaggacgcccggattcccacgcttaaggaagtctatgaactgttaaagcctgcggggctgacagtgaatgtggagcttaagaccggcatcatactctaccctgagattgaggaaaaggtactggctctcactgcttccatggggatggaggacagggtgatttattcatccttctgccaccccagcctggtaaggcttaaggaactggacagcggccttaagacagggcttctgtactcggacggctggattggcgcggcagcctatgggcggcatacagtgggagcggatgccctgcatccggccctgtaccacatgcaggatccggatcttatcccggctgccagaaggcagggactggcagtgaatgtatggacggtcaatgaagaaccgcatatggaaatgctggtgcagcagaaagtggacgctatcattactaaccggccggacctgtgcaggcgggtcgttgacaggtacacagatctatgacagaatatttgacagaaagcaggcatatatgataagactggttgcaattgacatggacggcaccctcctgcgccctgacgggcatatttcagagaggaatgtgcgtgcgcttaaaggacttaaggctatgggagccgagtttttgatttgtacgggacgcagctatatagacgcattggaaccccttaaggaggccggactcagggcacctgtggtgtgcatgaacggagctgctgtgtatgattgggacggcaggctcatggacgagatacggctttctgagagacaggtaaggggaatcctggactgctgccaaaaggaggacattatctttgatttcatgacggacagaggcagctataccacagccggggaggcacagtttagggcatgttttgaacggaatgtgctgcttcccatggcggagtttacctatgagggagtgagagaccggttctcctttgtggaggaaggacagctctttgagctgggtctggcattttataaaatatcggtcatccatgaatcgcaggaggttctgggcagaattaaggagcgcctgtccggtatagcggaactggcggttgcgtcctcctttgccaccaacctggagctgacccacagctatgcccaaaagggccgggctctggctttttacgcgtcctccaggggcgtgagaccggatgaaatcatggccataggagacagcgagaatgactattccatgctgtccatggacataaaatatacggttgccatgggaaatgccatggagagcattaaacgtatcgccagatgccagacccgctccaatatacaggatggtgtggcatatgccatagaaaccctggttctaaccagggaggccagggcgtattaagcctctgagtgatggggacggagcataattttacaggtgataagcaaagagtccgcaggctctgccccggctctttttttgttgtattcagaaggtatgtgagagtttgaatgatttcggattgacaaataaatagtccggtgctatgctaaatgacaacagggagcttgtgaagcaggctgagaggaagtaatcgaacttcgacctatcgcacctgatttgggtaatgccaacgtagggaaatatgagacatgtatgtgtattcaatgcataatttaagtccatatcccgcgcggtatgggcttttttatatcagagaaaagttccggccttttgcgcggtatggatataagcaggatttaacgctgtgcaggaaatacgccgctgtaccagaaaatatgcctctctaccaggaagataggcgggctccaagtaaaaaacatggaggtatgactatgaaagtaaacattaaaaaactggcggtaagcgccatgctgacagcggtggccgtgtctttatccggcttttccatccccataggggcatccaaatgttttccggttcagcaccttgccaatgtactggccggtgttttccttgggccgtggtatggcgtgggaatggcgttctgcacatcctttatcaggaatctgatggggacaggcagtctgctggcatttccgggcagcatggtgggcgcatttttaggggggtatctgtaccagcgtttcggcagactgacactggcctacgttggggaggtgttcggcaccggcatactgggcggaatgctctgctatccggtagccacactggtgatggggaaggaagcagccatttttgcctatgtaatcccatttcttatgagcaccatgtgtggtacggtcattgccgcgttcctgattggtgtgctgtataagtccggggcgtttcagtatatgaggcggatgctggatctggatgtacagaccggcaaagccatgggaagataacaagaaaaaggataaatcagataatgcagagacaatggatgaaggacttaagggagcgctctcccagagtccactgtataaccaattatgttacggcaggggacgtggccaatatggtcctggccgcaggcggctctcctgttatggcccaggggctgcatgaggtggaggatgttacctccatctgcagcagccttgtccttaacctggggaccctggaagaaaggaccataccggccatggaggcagcgggaagaaaagcggccggcctgggccttcccgttatcctggacccggtaggagtcactgcatcacggtttcgcagacagacagccattgatataatccggaagacatccccttctgtgatccggggaaatgaggcggaaatccgggccctgaaccaggaactgagaggacatgagacgggcaacacctgcggtgtggattcggaaacctttggcaccattgagagccgcatggaaacggcctgttccctgagggaccttacaggcgcggttgtggttatgaccggggtagaagatgtggtggccggaaaagaaaaaaagtttattgtcagaaacggccatccctggatggccaggattacaggcagcggctgtatgctggacgggcttatgggagcgttctgcggtctgtatggggaaccgggactggccggtctgacagaggaggctgcggtcacggctctcagcgcacacgggctctgcggagaactggcggccgcagagactgcaaagcggggaggcgggacaggcacattccgcatgtatctgctggataaaatgagccttctggatgacgggacactggagagaggtaagaaaattgagattcgatagaagacagcttttgatttatgcagtaaccgacaaggcatggaccggtaagctatcccttaaagagcaggtggaggaggcgttaaaaggcggcgcaaccatggttcagctcagggaaaaggaactggataaaggaaattttgaggaagtgctgagaacggcctgggacatccgcagaatcacagaagaatataatgtgccccttatgattgacgacaatctggagctggctctggcctgccgcgcggacggcctacatgtgggccaaaacgatatggaggcgtctgaggccagaaggcttctggggcctgaccgtatactgggagttacggcaaaaacagtggaccaggccagaaaagcccaggcagcaggtgcggattatctgggcagcggggccatattcggcaccagcacaaaagcagatgcgcgtcccatgacaatggagaccctgaatgcaatctgtgactgtgtggacattccggtggtggccatcggaggaatctgtctggataacataggacgtctggccggcagccatgcagcgggagcagccattgtttcaggcatattcggggcgccgaatatacgggagaccacagaaaagctggtaaaagcaatggaggagataacacggctgtccgggcaggacctgcgggccggctcggtgtaagaaaatggaaaaaatataaaaactttcaaaaaaaccattgacatttggaaatgggctgattataatgagttcaacattcaacaaaacataaaaaactgttgagcaggagtaagtaagattgtaattccaggcgcagagagcttccggccggtgtaagggagcattggattagagtctgaatggacctgcgagggcagctggaaaccagggtcatagagatatgtctgatgggagtatgggctgacgggtatcccaccgttaccagggagaacgcatgatggtgcgttgcagagcgggcgtattttatttctttgttcgatgacacagcatcaggttaattttaacttgatgcttttttaattcccagaccggagaatggcggggagagtgcaggacatggaaagcgccaaccagggtggtaccgcagaagccggaagaagcttttgtccctgctgattacagatgtagtcagcagggataagggcttcttttttttgatgaatgtgacgcccggacccgggaatggtgatgggctcagaataaacagccggtttgaaggaaaggagttaaggtaaatgataatcccagcttgtgatgaaatattaagtctgtcgggggaatacgatataattcccatctgccgcgagatttacgcggatgtagtgacccccataacactgctcagacgtatagcagagaggagcagccgtttttacctgttggaaagcatagagggcggcgaaaaatggggacgctactcctttctcggatataacccggtgatgcgcgttgcctgccgctgcgggaaggtgaagattgagagccatgtcagccggttcccatccagggaagtacaaacagatcatcccatggatgtgcttcgtgagatattggcacagtacaagtcgccccggctgaaagggcagccgccctttaccggtggatttgtggggtattttgcatatgcaatgattgagtacgcggagcccacccttcatatcagcagaggcggtgcaaatgactttgatctgatgctctttgacaaggtcatagcctatgaccacctgaaacagaagatacagattgtggtaaacatgaaaaccggcaggacagagaggggaatctgtgaagagctggagcggtgccaaggccggaagcgttgtgaaggccgggaaaatgggaacacctccggcggtctggaatatttgatgaaggagtacgaaagggcctgtgaggaaatacaggaaatggcctcccttatcagtgacactgcacctcttaagaggctgtcctcaccggagaaaccatcctttgtatgcagtgtttccaaagaagaattctgcggtacggtggaaaagacaaaggagtatattctggacggggatatcttccaggcggttatatccagacagtttaccagttcctatgaaggcagtctgctgaacgcctaccgggttttaaggacgaccaacccatctccttatatggtttatatgaacatagaccaggatgaaatcatcagtacatccccggaaacactggtccgccttgaaaacgggcgccttactacctttccggtagccggttcccggccaaggggagccggggacgaggaggacagaaggctggaggaagaacttctggcagatgaaaaggaactttccgagcacaatatgctggtggatttgggaaggaatgatattggacgcatcgctgagttcgggtccgtggaggtgacggagtacaagatgatacacaagtattccaaaatcatgcatatctgttcccaggtggaaggaaatataaaacccggcctggacggctgttcggcggtggaggccctgcttccggcaggcaccctatcgggagcgcctaagataagggcgtgtgagattattgaaaaactggagtccgttccccgcggaatttacgggggagccctgggatacctggattttaccggaaacctggacacatgcatcgccatacgcatggcggtaaagcaggcaggaaaggttacggtccaggcaggaggcggaatcgtggcggacagtgttccggaactggaatacgaggaatcagcaaataaagccaaggccgttattcaggccatccttcaggcaggggaggtagacgacagatgatcgtattaattgataattatgacagcttttcctataacctggtacagatgattgggagtattgagccggatataaaggtggtccgcaacgaccaggtaaccgtggatgacatagaaagcatgaaaccaagccacctgatactgtcgcccggaccgggatatccccgggatgccggcatactggaggaagcagtgataaagcttaagggaaaaatgcccattctgggtgtgtgcctgggacatcagggtatatgcgaggctttcggcggaaccattgcccatgcaaagaagctgatgcacggaaagcagagcaatatcaggctggacagtcatataaaggaagaaaagtccggacttccggaaaagatgggatgcggatgccggttatttgaaggtctgccgtccgttataccggctgccagatatcattccctgtccgcagtgcctgagagcctgcccgaggaactggaagtggtggccctggactgtatggaaggagaggtcatggcagtttcgcacagggactatcccatatacgggctgcagttccatcccgaatccatattaacgccggatggaaggaaaatactggaaaacttccttgatatcgggacgatacaggcaatgtaaatggtgagagacaaacgaaacagaaataaaaatcaggcattgtaaaaaaggagaatgactatgatacagaaagcaattcatgaattggtagaaaataagaatctggattttgaaacaaccaaggaggttatggatgaaatcatgagcggaaacgccacccaggcgcagatatcctcatttctcacagctctgaggatgaagggagagaccattgatgagattacggcctgcgccactgttatgcgtgataaggcggtaaagctgtcgccgccctttccggtgatggacattgtgggaacaggaggggacgaggtgggaacctttaacatttccaccaccagcgcatttgtggctgccgccggaggcatacgggtggcaaaacatggaaaccgcagcgtatccagtaagagcggcgcggcagatgtgctggaaagactgggggcagagctggctctgacggcggaacaggctgaaactgttttagaggacaccggaatgtgcttcctgttcgcgccggcataccattcctctatgaaatatgcggctcctgtgaggaaagaaatcggaatcagaagtatatttaacatattaggccccctgtccaatccggcaggcgcatccatgcagctgttaggggtgtacagccgggatttggtggaaccactggcccaggtgctggctaacctgggagttaccaggggaatggtggtatgcgggggagacggactggatgaagcgacacttaccggccccacccatgtatgtgaaatccgttacgggaaaattacggcttatgatatgacgcctgaggaattgggcctgaccgtatgcaatctggaagaactcatcggaggaacacctgaggagaatgcacagataacaaggaatatcctgtccggaagcctgaaaggaccgaagcgggatgtagtggttttgaacgcggccatcagcttatatctgggaattgatgactgcacggtgagggactgtgtcaagacggcacaggacatgattgattccggagcagccatggctaagatggaagaatttatccaggcaacccaaaaagcagcaggagaggtgaaggcgtcatgatactggataccattgcccggtccgccgggaaacgggtggagcaaagaaagcaggtaaaaccgctggaacaggtgatgaaggaagccttcaaatgcagagagagagaagatattaaaggggaagacggaacaggcggaggatattcttttaaggcggcgctgtctaaaccgggagtttcctttatctgtgaggttaaaaaggcttcgccttcaaaaggactgattgctcctgattttccttatgtggaaatagccagacaataccaggaagccggcgcagatgctgtatccgtattgaccgagcctgaattctttttaggagcagaccggtacctggaggaaatccatggtgagatagaccttccgctgctgcgcaaggattttaccgtggacgaataccagatttatgaggcaaaggtgctgggcgcctcctctgtcctgctgatctgttcccttttggacatggaacagctcaaacggtttatgggcatctgcggcagactgggccttagctccctggtggaagcccatacggaccgggaagtagccatggcagcagaggcaggggcccatatcattggaatcaataaccgcaatctgggcacgtttgaggtagacttcacaaacgccctgaggctcaggaagctggtggaccggggcactatatttgtggcagagagcggaatcaggacgcctgaggatatagagcttttggcggagaaccaggtagatgcggttcttgtgggagagaccctgatgcgggcggcagataaaaagcaggctctcagggaacttaagtcccggatacggtagggccggacatgaaccgggacagatagaggaaacaggacagggagatgaatgatgaagacatgcaggcttaagatatgcggtctcagccggtttggagatatactggcggccaatgacattctgccggactatatcggctttgtatttgccgagagcagccgcagggttacgcctgataaggccgcccagttaaggcgggagctggataagagaatcagggccgtgggcgtatttgtcaatgcgcccatggaggagatactggagctggcagggcaccgggaaaaggaaagggtgattgacctgatacagctccacggagatgaggatgaggcttacataagacaactgaagaaacacaccccgcttccggtcatcaaggcggtgcgggtcagaagcagggaacagattttaaaagcccaggagctgccctgcgattacctgcttctggacacctatacaaagggcaggtacggaggcagcggcactcagtttgactggaacatgataccggagttaaaaaagccttatttcctggcaggcggcatacatctgggcaacataaggcaggcagcagcccatggaccctactgtattgatgtcagcagcgcggtggaaacagggggcaggaaggacagaaggaagatggaggaaatagcccaggtcctgcggtgaaaaatcgtttaaaaaaggagaaacagaaatgtcaagaggaagatttggaatccatggcggccagttcataccggaaacactgatgagcgctgtcacggaattggaaaaagcatatgagtattataaaaaggatccacagtttaaggctgagttaaagtatctgctggaggaatacacaggccgtccgtcacgtctctactttgcagagaagatgacaaaggacctgggcggggccaggatttacctgaaacgggaggacttaaaccacaccggctcccacaaaatcaacaacgcactggggcaggtccttctggccaagaagatgggaaagaccagggttatagccgagacaggggccggacagcacggtgtggccactgccaccgcagctgccctgttgggtctggaatgcgaggtttacatgggcaaggaggatacggaccgccaggcacttaatgtataccgtatggagctgttaggggccaaggtgcatccggtgaccagcggaacccagacattaaaggatgctgtcaatgaaacgctcagggagtggactaaccgtatctccgatacacattatgtcataggttctgtcatgggtccccatcccttccccatgatggtaagggatttccagagtgttatcagcagggaaatcaaagagcagcttatggagaaggaaggaaagcttcccgatatggtaattgcctgcgtgggcggcggaagcaatgcaatgggagccttttatgaatttatagatgaaaaggacgtgaagctggtaggctgcgaggcagcgggacggggtgtggagacagagcagaccgcagctaccatagcaacaggccgtctgggcattttccacggcatgaaatcttatttctgccaggatgaatatgggcagattgcaccggtgtattccatctcagctggtttggattatccgggtatcgggccggagcacgcgcagctgcatgacagcggcagggcacagtatgttcctgtgacagatgatgaggcagtggattcctttgaatatctgtcacgtatggaaggaatcataccagcagtggagagcgcgcacgcggtggcctatgccaggaagatagctggttccatggataaagaccagattattgttatcaatctttccggcaggggagacaaggatgtggcggcaattgccagatataagggggtagaactctatgaataggatacagcaggtgtttgagaataagaaggcattcataccttttataacagcaggcgacccggacctttccgtgacagaggcccttgtgccggccatggcagaggcaggagcggatttgattgagctgggcataccattttccgatccggtggcggagggaattgtcatccaggaggctgaccttcgggccctggcctccggaaccaccacagataaaatatttgatacggtgcgccggatacgtcaaaaaacagatgtgccgctggcatttatgacctatattaaccctgtgtttgcatatggtgtggataagtttatgaaaaatgcagctgattgtggaatagacgccctgattgtaccggatatgccctttgaagagcgggaggaactgctgccggcatgcaaaaaatacgatatgaccctgatatatctggtggctcccacatccagggaacgggcccaggccatagccagggaatccgacggatttgtgtactgtgtatcatctcttggagtcactggcgtccgaagcgagattaccaccaatattaaggaaatggtggacaccgtaaagcagggcagggatgtgccatgtgccataggattcggcatctccactccggaacaggccggcaggatggcctcacaggcagacggggttatcgtgggaagcgccattgtgaaaatggttgccagatacggaataaactgtgtggagcctgtctgcgattatgtaaagcagatgaaggcggcggttggagtatagacagtacggaccggtactaattgacaggcactaaaggggccgcggcagagtatgccgcagggcccctttttgatggaaaaaactatattttttacatgttcatggagaatactcacagacagcaggtaagaataaataattcaggattaatcttgtgatataatcggaataggatacatcactttcagaagggaggagtcatatggattcatcagtactgttgttttttgaaaaaatgccccaggccctgcccatttatgaggcgtttacaaagcgtctgcttaaggagctgggacccgttcaggttaaggtacagaaatcacagattgccttttcaaaccgttaccagtttgcttttatctggcacccttccagacggttcaggggcagaaagggcgtttatatggttgtaacgttcggagtaagccatcgcatagaagacagccggattgaggcggcaacagagccttaccccaaccgctggacccatcatgtgattgtacagagtgaggatgagatagatgataagctgatggggtggatcagggaggcttatgagtttgcgttggtgaaatagggaaacagccaatcaggggaaattgaagattgaatgcgatatgcggtttgtccggcgggggacagccgcatatctgcgtttttggcataagataattagtttagctgtaaataacaaaacgaggaagaatgaaggatggactggcttgttcaactgtaatttttaatccctgctttatgcaactggtgtaaaaacttgcaaatgttgtaaaaaaatcgcaatcatacagggagggggaccaaaaacatcgaagatatggatataaatattgaaacaaggtaaaaattgttgcgtataaaagaaaataatatatattatatctgaatatttaaataaaaagaaaataatcacagttaaaaacacatcaagaaacgcaaaaaaatcaggacaaaacagaaaaaaagacagcatagaatatgatattatttctaatagatagaagaaaaataacaaaaaaatatacaaattatataaagatgggggatatatggagagtaagaagatattagtggcaggttccattgtattggatattattccggaagtatatattccgaagggacagccaataccggaaatattcctgagcgagggtaagaccacggaatgttcttatacccatatatatttgggtggggaagtagggaatacaggtctggggttaaagaagcttggatgtgatgtaagactggtcagtaaaatcggggatgattccgtaggggaaattgtaagggaaatcttaaaccgctatgacacagattatactctgattgaaatgatgggagaacagtcctcggccagtgttgccatcgctttgccaggtaaggataaaatgacacttcacagcagaggggcatctcagctttttaaggcggcggatattacggacgagatgctggaaggagtgaagctgttccactttggttatcctcccagcatgaagtacctggtggaaaatgaaggtgaggagttggaggacctgttaaaaaatgtaaagtctaagggaatcaccatatcccttgacatgagtcttcctgacttaaagacatttctgggtcatgtgaattggagaccaatcctgcagcggatactgccctatgtggacttgtttttacccagcctggaagagagcatttttttccttcacagggaggattatgttgagatggtgcgtaaggcaggggccaataaccttctggattatattgatgtaagaggaatggctgagaaactggcggatgagcttctggaaatgggcgggactatagttatgctgaaatgtggtcatgagggaatgtacttgagaacagcagagaaagagaggtgggggaatatgggaaaagccgctccaaacagcctgaacggatggtatgacaggaaaatctggcagaaaccagtaaaggttaaacggattttgtccagaacgggagccggcgatattgcaatagcaggttttttgtcctcgttcctgcatgaggataatgcaaagacagctttgggaatagctgcatgggccgcatctatctgtattcaatcatatgataccattagcggcctgtgcccattaaacgagttgtaaaacaaaagagaaggagtaggaggtatttcaagatgaaaaaaggtttggcaaaagtaacagcaataggactatgtgtatcaatgctcatttccttggcagggtgttccggcggaggcggctctgctactacggacaaggcagctgaaaaggcggcagaagcagtaacggataaaaatattcagagtgaagcggagggaacacaggaacccatagagctgacatactggtattgggaagacgagcaggggacaatagagaacatgcttaaagataagtgggaggcctatgcaggagatcggattaaggtgaattttgaatccgtaccgtcatctagtttccatgataagctcataacggccataagcacgggaacaggaccagatgtgtttatctgtaaaccaatgtgggctccggaactgtatggaatgggcggtctgatgaatatggaagacgtgtttgagggatgggagtatgcagatgaagtggatgactttatgctggagcaaatgagggcaggattggataagctgtacttgtatccccggaccaccattgtaatgtatttgtattgccgcaagtcaatgttcgagaaggccggaattgattatcctaaaactgtggatgaattctttgatgcctgtgagaaactgactgtggacacggacggggacggcaaaacagatcagtatggatttggtatgcgcggcggtaacggcggccattacatgtggtcatcctttgtattcagcgcattgaagggtaaggattattatgatgcagagggcaaggcttcactggctgatgcgaaactggctgagatgaaccaaaagtacattgatctgtatcagaatggttatgtgcctccgtcagcaattacggacggattcagtgaagttctaactaattttaaatcaggtgtcacagctatgctgtatcatcatattgcatccattacaaccataaaggaaacctttggtgatgattttgaggtgatacctgttcccactggggagagcggtcaggcatttgggtgtcaggagatgaccggatgggctattaatcccaattctaagaacctggaggcagcggaggagtttgtgaaatgggcgtcttcacctgagattcacgatgtgcggtgtgagaagctgcagcaggtaccgtttatgtcttccgtccaggcattggacaagtataagaatgatcaggcgtataaggtatctatggataatatgctttctgcccatacattacctgtagggcctgaaattactacttatacagaagagatgtgggcacagacattccagagggccctgatgggagaactgagcagcatggagatgctggaacagctggacaagtgtctgaacggagaaatgtagtattaagaccatgagagggtgagcgtatgaatcggggaaaagcagccggaaaaaggtgcaggaaatcagacatttatattcccatcatattgttgatgccggcatttctgctggtggtgggagttattatttatccaatctgctatgcggttggactcagtttccaatattataaattgacggattatgtaaaccgacagtttatcggtttagaaaactacatatctgtctggaggaatgagacctttctggcttccctgggaaatacggtaaaatgggtagggataacagtggcctgtcagttcctgtttggactggtgctggccatgatcctgaatgtcccattccggggcaggggcatcatccgttctattacgctgatgccctgggttactccgggtgtggtgattgcacttatgtgggtttggatttataacggtaattttggtgtcctgaacaaatgtctgacatccttaggcatcataagcaaaaacatcccttggctggggtcttcccagacggcgctgtacagccagattgtaactatgatatggcagggaattcccttctttgccattatgatactggcagcactgcagaccatatccgcagacctgtatgaggctgcggatataagcggggccaattcatggcaaaaattcctgtatataacactgccggagctgatgcctacaattataactacctgcatgctgagaattatctgggtgtttaataatgtagaagtactttatcttatgacgggagggggaccaggacacagttccatgaccgtgtcccttgtagcctatatcaaggcgcagaaatccctggatttcggacagggatccaccatagcaatctatggtactttgtttatgattctttttatgaccatatatttaaagttgacgaggcggggggatgaagatgaaaaggactaaaagaattcaaaagcttgtaatgcttattccgcttctcctgattgtatgttttgtgatatttccttatatatggacattcctgacgtccataaagcctacggatgaactgtatacaaccaacataaaaatcctgcccagggaaacgacctttcagaattatgtaacgctatttacgagtacggatttccttgccagtatgtttcacagtatcgttattgcagtcattaccagctgtatctccatgcttgtctcatccatggcatcctatgcctttgccagataccggtttaggggaaagaatctggcactcagcggtatcctgctgttatacatgtttccgtcggtcctgtacctgactccgctgtttgtggtgtttaataaattgaagctcataggttctcctgttgcgttggtagtttcatactgtacatttaccatacccttcagcatatggctccttacctcatacatgaagagcatccctctggaactggaggaggcaggaaagatagacggagccaatgtcccccagctgttatattatgtggtaatgccgcttctgaaacctggacttatcgctacaggtacctacgtgttcatcaattcttggaatgaatatttatttgcggtcatgttcaccacttccaataacaggacactccctgtctcgctggcatccctggtaggagagtacgacctgagatgggacattatatcagcaggagcagtggcagccatgattcctgtggttatcctgttcatgttcatacagaagaacctggtggcaggtctgactgccggttcagtaaaggggtaaaaatgaagaatcaagcagcatttttggttgataaacagagattagagcttatggattgtgatatgccgtccgtttcggatacggatgtgctggttgaagtggcccatgtgggaatctgcggaagtgatatgcatatatttgaggatccgcattacgcggtaaaggatataaaacttccggtggtgctgggccatgaatgtgccggacgtgtggcagcagttggaaaaagtgtaaaaggaatcataccaggtgaccgcgttgctctggaaccaggtgttccctgcggcagttgtgagttctgcatgagcggccggtataacctgtgtcctgatgtacggtttctgggagcacgtccatggctgaatggggcattcagccgttatgtcagccatcccgccagatggacgttcaggctgcctgatgcaatggacacagtggagggggcgcttctggaaccacttgtggtaggaatgcatgcagtagacagggcaaatctcaggacaggtcagtctgtgctgatactgggggccggttgcattggcctgatgacattggaggcatgtctggccagaggaataacaaatgtgactatgtcagatttatatgaaaacaggcttgatatggccggtaccataggcgccaggcatgtggtcaattcatcagaagaggatattatatcacgctccgcacagataacagccaacagaggatatgacgtaatatttgaaaccgcgggaagccagaaaacagccgcactgacagcggatctggtgaaacgtggaggaaagattgtaatggtagggaatgtgttcggggaaacaccttttaactttttcaaaacaaattcaaaagaggcagacatactgggagtatttcgctaccgaaatctgtatccggcagccatagagctttgcagcgaaggacaggcagagcctaaaaagatagtgaccaattattttgagtttgagaagatacaggcagctatggagtatgccatcacacaaaaacaggaagctgttaaaaccgtgattcggatgtagaaagacgagggtagggatatatgtatacagatgtgaaaacaatattggatgacgcatccagaaataattacggcgtattggctgcatctgccattaatctggaattggcaagaggattgatagcagccgcagacgaactccagtcaccattaatcattctcatgggccagatgcagatgaccaaacatgccagagcagatgtgatggtgcctctcataagaacgctggcagaggagaccaatgttccggtggccctgattctggaccacggaagggactgggaggtcattacacatgcatacagaaatggattttcctccatcatgattgatgcttccgcttatgagatggaagaaaacatcagaaggacaaagaaagtcatagaaatgtgccatcctcagggagtggcagtggaagcagagctgggacatgttggacaggcagcactgggagatcagaccgatgattcctgctatacacggcctgaggatgttacggagttcctgaatcagacccgtgctgactgccttgctattgcctgcggtacagcccatggacagtaccccaagggggttacacctgagattcgttttgatatcataagggctgtcaaaaaggtgacggatgtgcccatcgcacttcatggcggttcgggttccggggatgaaaatattaaaaaggcagtggaagcaggcatcaacaaagttaatgtctgcacagagatatttaactatgtccgcgatgaaatcaggaagacgctggagcagacacctgagattgacctgttaagcctgatgtcccggaccgagcaggcagctaaagagattggtaaacattttatatgcctgaccggatctcagggaaaggcagctaatttccagagaaagtcagcctttcagtacggctttgcacagacagagacagacgggggcgaatagggggaagaattaacaaaagcagccccaaagagaaaacgaaaatatcataatgaaggaaagtagacaagggtggaaccaataatcggggttttccacccttatttccgtttaaaatcctcagcttgtttgaatttagaatattgtttaggactgagaccggtgtgctgtttaaagatacggctgaaatgggacaggtttttataaccgacaagactgcatacagaatctacgggaagattttgtgatagaagctcctttgccttcatgatgcggcagctgatgatatactggtttggagaggtacctgtcacattcttaaagagattgcacagataaaatttattaatataaaaggtagaagacaaaagttccagggaaagctcgtcactcaggtgtgtatggatatggttaatgacggagtaaatcaggctgtaggatgatgttatggtgtcggatgaaatattatggtatttccgatacaggttattaataaaaataagaaattcccccaaaagaaatttgactttaaggtcatatccataatcctgtttggcggtgtcatcattgcatgtaatcagtcgctttaactgggtcaggcactcctcggcctggggaatggtcagcggcaggatgtatggattcgagaacggccttaagaaaaaacactccagcaaatccgtttctttggaggataaggattcaatgtattccggtttaaaggaaagcgtgtaccgttcaaaacgttcatgagtattcagggtaatcttatgcaaatccatattattgaataaaataatactgtttttgggaaccttccagtttttttcgcttacatgacatactgagttgggggtcagcatgaatataatgtcaaactgtttatgggtatgatattcatgctgttcaggaccgtaggtcactttgtacttaaaagaaaaatcctcggaaaaatggggggatatgggtgtttttgcaggcatatttttgagctggtcgcctcccttgcaaattatcataatgccaattattgtacataacataccaggatttatgcaactgtttcattaaacatcaaaagaaatgcaaaaaacacagaaagaatagtaaaaatatcttgtttgaccttaataaaaggcgcatcatggattttggaaaaactattgaacaaaacaaaagcgttctgtcaatattttggaaatagcaaataggggaaagctgttaatataagattatcgaagggatggcagtgctatggaacaggaaacaggagggaacatgatgcaggaacggcaatataaaattctgaagctgctgtacaggtcagatggatttgtgactgtggagcgtctggcggcagatgtgaattgttcccttaagactatcagaaatgacctgaagcagctgggaagcttcctggaagaatatgagctgggaaaggttgtctctaagagcaacaaaggcgtgtgccttataaaggacaaggactgggacacggcaaagcaggcatggaatgatgtgaaccagatggagctgtatggcacagacaagcatttccagatactggaactcctgctgaagcagagaagcatacagaagatgaaactggagcaaaggcttctcattagcaggctggatgctgaaaaagctaccagccaggcatctgtatggctgacggcccatcatgtagccgttacctgtaagagaggccagggattgcagattgagtgcagcgagtattactggcgcatggccatgtgggaactctttgcagatatatccagaaagcggcaggagtttggggaccagaccctgaaaagccagacagaaaagttcctgtggggatttgatatggccggggtaacaggggccattgcagggctggagaaaaaatttgggatacactacagcttcgacgggtaccagcagctgtcatttctcctgtcactgtgtgttatacgaatcaggaaaaaggagtatgcagagattcctgcggattttgggcatcagagggcagaatggcagggcctggaatatgacctcagtatggccgaaacatgtatggaaagtcttaaggagtattatcataccgacttcccggaaggagaaaagcagtttacggtattggttttaggggctgccgagatacaggagtttacagacgaggcgtccaggcagacttacatggaggccaaccaaaatatctgccgggtgacagacaaggtgatttccattaccggcaatattctgggacaggggcttgacagggatgattacctttttgacagcctccttctgtatatgaaatccaagaccttgaaactgcggtgcggcatcctggaggaaaatcctctgaaggaggtagtgaagtccaagtatcccaatatttatgccgctgcctggtcggcaagtcttatcattgagtctgaacttgaagtgagaatcggggaagatgaggtggcgtacctggcgttatatataggcggtgccattgagcggctgaacgtgggagtggaggtgtgcatcctgtgcaatcatggtatcggaatatccagaattctcaaagagcagattgagcgctccatacagaatattaatgtagtggatgtcctgaccacaagggatacatgtaagattcagaggagccagtgtgattttcttatatcatctgttccggtgggggatgtgtttgcaggcagggatgtggtacagattggaaatgtgctgcagccctgggatatacagcagattcagaataagatgaaacaggtgcggaaaaagaagatgagacggattgccgaaaagacagagctctccgagtaccagctgtttcatccgtaccttgtataccattttccggaaaggacacataagaaggaaatcatatccttcctgtgcgccaggctggcagaggcgggttatgttacaaaggattatgagcagactgtactggacagggaggaaaccacatccactgtgctggaacttggggtggccattccccatggagctgcgttttgtgtctgccgcccggtcattgcggccgccatattggaggaaccggtagattggggcagggacaggagagtggaccggatttttcttctggcattgaatctggatgaacggtttaaggcaaaagggcagattatccgcttttattccgccattgtgactttattggacgacaaggaagcctatgaagaattccacagcctgagagggcaggaagaaatagcaggctatttaaattctatagtaaaaggagacaggaaagcatgaatctgctggaggtaatcaatgaaaatgcagtggccgtcaatgtaaaggcgcagaataaggaggaggtgtttgaatgtgtgtgcgaccttcttttaaaggacggcagcattacatccaaggaagagttcaagcaggatttatatatacgggaatctcagggaaaaacaggcataggggacggaatcgccattccccatggaaagtcgctggcagtgaagcgtaactgtatatcggtccttaagctggaacagcccatacagtgggagacgctggatggcctgcctgcccaggtgttcattatatttgccatcaatcaaaaggacaaggatgactacttcctgcgcctcatggccagcgtggctaaaaagctggcacaggaaggaacatgcggcaaactgatgggaagcagcacaaaggaagatattctggaagcattttgctagggagaccacaccacaaagaacgaggaggaaataaaggatgaagatagtaggggttacggcatgtactgcgggtattgcgcatacatacattgtcaaggaaaagctggagcaggcagcacggaagctgggatatacatgcagaatcgagacccaggggagcatcggaatcgaggagcagctgacaccggaggaaatccaggaggcagatgtggtcatcctggccattgatgtgaaaatatcaggggaaaaccggtttaagggtaaaccagtggtgcgcatgagcacggagaaggccatgaaaaatacgggagcaatgcttcagagtatcaaggaagctctgacaaaaaagaaaaacggagggaattaagattatgggtgggttaaaactatcagagattaagaagcatgtgatgacaggaatatcgtttatgattcccatagttgtgggcgccggcttatgtatggctctgggaactgccattggcgggaccaaggtatcagaggcagagggtaccctgatatggtacatctggagaaccggtaagattggcatgggctttgtggtgcctgtgatcactgctgccatcgcgtattccatcgcggacaggccggccattgcccccggactgattctggggtccattgcatcggaaatttatacaggatttatcggaggcattattgcggcatttcttgtgggctatacggtgctgttcctgaaaaaatatctgaaggtgcctaagaccatgcaggggctggttcctgtacttattctgcctttcctgacaacgctgatttgcggagcccttatgtttgctgtcatagggaaaccggttgcctttgtcatcaatgcattgcagaactggctgataggacttcaggggggatccaaattcatcctgggagccatagtgggaggtatgtgcggtgttgactttggcgggcctatcggcaagaccgcatccctgtttgccaatggtcttctggtggacggtatctacggaccggaggcagttaagctggttacatgtatgattcctcctgtgggcgtgaccctttcctacatccttaccagaaacaagtacacaaaggccgagaaggaggcggtaaaggccgcgttcccaatgggcatctgcatgattacagagggtgtgattcctctggctatgaacgacccgctgcgcgtaatcggttcctccgtgattgccacctccatagcaggaggcctgaccatggttctgggaattgagaactatgtaacagcaggaggatggtttatcatcccgctgtccaataagccaatgatgatggcagccatggtggtcctgggaggcgtcatcatgggagtgatactctccctgtggaagaaagtggtgacggaagacgattccatggactttggaatggaacaggaaaatggggagagcaccacagaaggaatgacatttgagaacttttaacacattcgggtatgtttttacaggaggataaaaaatgctgctgaatctgcgggaaatactggaacctgccgtaaaggataattttgcagtgggaggatttaatgtaacagaaagtaccatgttcaaagccattgtggaggaggcgcagtaccgggaagccccggccattatccaggtctctcccaatgaattccagttttcggaacgggaactgtacctgtatttctcggtccgcctgcagcgcagcaggaatccctttgtactgcactatgaccacagcaaatcctatgagggatgcatccgcgcgatccaggcaggctttacctctgtcatgtttgacggctcgcagatggagtatgaccagaatgtggagtgtacacgccgggtcgtggaggcggcccatggggccggcgtatcggtggaaggggagattggcaccataggggagaccgaggactatttaaacggcacggtccgggatatggtatatacatcaccggagctggccagacggtttgtagaggacaccggcgtggacgccctggcagtctccattggcacggtacacggcattcttccaaaaggatatgtgcctaagctgcagcttgggcttctgaaagagctggcagctgcggtgccggtgccgttagttcttcacggaggttccggcacgccccatgatgaggttgcggctgcctgcaggacaggcatacacaaggtaaatatatccagtgagttcaaacatgcctattaccaaagcgtaagggaatttgtaacaaatcatccaaccctggtcagtcccacactggttcttaaggatgcagtgcaggaggttagaaatgtggcagggacaaagatgcaggtgctgggcagtaccgggaaatcgcattgctacaggaaatactaaaatttaaggggagtacataatgtatacagatatcaaaacaattcttgatgatgcaaatcaaaacaactatgctgttctggcggcatccgcatttaacatggagctggccaggggacttatagcggcagcagatgaaatgcaggcgccgctcattatcctcatgggccaggcccagatgacaaagcacgccaggccggagctgatggttcccatgattaagaccctggcagaacagaccaatgtgccggtggccctgattctggaccacggcagggactgggaaaaaattacatgggcttacaggcagggattttcctccatcatggtggatgcctcggcctatgacatggaggagaacattgccaggactaaaaaggcggtggagctgtgtcatgtacagggactggcagtggagggcgagctgggtcatgtaggccaggcagccactctggacggatgcgacgtgtcgctgtacacaaagccggaggaagccgtgcgatttgtgcaggagaccggggtggacagcctggccattgcctgcggcactgcccatggggattatcccaaaggctttatccccaccattaattttgatgttataaaaggtgtgaagcaggcagtgaacatgcctctggcgcttcacggcggatccggatccggagacgagaacatcaggaaagcagtggaagcaggaatcaacaaggtgaacattgccaccgagatattcaatgcatgccgggattacgcaaaaaaccgtctggatgaaaaaccggacctggattatatgtcccttatgatggaagtggaacaggaatgtaagaaaacagtaaagcattttatcagcctgaccggttctgaggggaaggcagccggatttaagaaaaagtatgcattctgccacggaatcagccagattgatactgggattggcgaatagggatatgcgctgcagcaccaagcctaatccgcatgcttcctccggtactggattgggctgcatccggcctgctctttgaagaccctggaaaatgaactgaggttggtatatcccacggcctgtccaatcatttccacggagtaatccgtattaatgagaaagtcctttgccctggtgatgcggtattctgtaatatagtcgctcactgtcatcccggagatctccttaaagacataatacagctgggtcttgctgattaaaaacagccgggacaggctgtccgtgctcagattgtcgctgtaatggcccccgatgtattcataaatatcatataccagccgggcatgctcctggtaggcagccgtgtttagagggccaaacctctcggtgtagagctggttggtcagcagaagaaattcgcccagcagaaatttaaggtgcagatctctaccgtaaacaggtgaagcagagccgccgctttccggcctgttgtaatcctccatcctggagagcacggagagaaaggagtccagctgccggtccggaacagtgagtaccacgggctgattaccgggacgaaacaggaaacattccagcagattcacttcaggagtggagaaccgggatatgtaattggaggaaaaatacagcacataccggtcgcagattcctgaaccgtcctccggatagatatagtgcagatccatctggttaaacagaatcaacccatttctggggatatcaatctcccctgtttcaaacttgcattttaagttgccggacagagcaaatataatttccatctgcctgtgcaggtggaaattctttttttcagttgtctcagttatcttgtgccttacggaaaattcctccggcagcttttccgtgtagcgtgaaaacgggatgtccatgggaacctcctgaacggttatctgtcatacgttgaaacacgttttagtatagcacggtttgaagaaaatgcaaagtgccgggataatctgcaaaaaaaggccgcagcacatcagatataatatgaaatgtaagaaaaacaggaaaatatgtaagcgaatctaagaaaaaaataaggaaacagctgctatgattgatgaaattgtaaaaagcacaagggaagcctcagctgtgctggaccgcataaaatccatgccctgtgaaggattggaaaaagaagtaattctgcccttgctgagaaaagcagttaacctgaagcttatgattcaggaggacgcccagactgatatcagaaagcttgtcattataagcatcaaacgccaggatttgcggaagggaaatctgccggatgaggtgattcagagggagataaagaaatacgactgccaccagaccagcctggcggtgcagaaaaaggtactgctgcttatgtttatagagagggagctgggaattgccatggaggatgatgaggcctcggacattgagaatctggatgaactggctgacgctgtcataaggcacctgaaagggggaaaacgatatggatgtaactgaaatccgcagggattttccaattctgaaccaggaaggaaagccgttagtctacctggacaacggggccacaacccagaagccccaggctgttattgaccggctgtgcaggtactattccatggagaattccaatatacacagaggaagctactccctcagcagccaggcatcccgtatgtatgaaagggccagggagacggtccggtcatgggtggatgcggagtatggggaggaaatcgtatttaccaaaggatgtacggagtcagtcaatctggctgccgcggctgtatttgagacatatgtctgcccgggagataatgtgattgtcactgagttggaacattcctctaactattttccctggaagaatcaatgtgagaaaaaatgcgcgcaattccgtgtggcattggcacagacagacggcagcctgagggcggaggatgtgctggatcagatggacagccgcaccagactgattgccgtcacggccatgtccaacgtgacaggcttctgcccggatgtggaccgtattataagagaagcccacaaacggggtgtactggtcctgatagacgctgctcaggccgttgtccaccgggctatatccgtcaggcagatgaaatgtgatttcctttgcttctccggccacaagatatacggccctatgggaatcggggtgctgtacggaagaaagatgtatctggaggagatggctccctatctgtacggtggggatatggtggtgaaaggagaccggggagaagtttcatataagaaatccccgtccaaatacgaagccggtacccaggatatagccggagcgcttggactggaggcagctctgctctatctcaatcgcaggggattcgaggagatgatccaatatgaggcggaactgggcgcgtatctgagggaacgcctggaagcagttaaaggggtacatgtaattggggaaccggctgtgcggcagcccttatctggcgggtccgaaccgcagccgcagtctggcgggtccgtaccgcagccgcagtctggcgggtccgtaccacagctacagtctggcgggtccgtaccgcccatagcagtgttcgagacagataagctgggtgcttatgacataggtgttctgctggccaatagcggaatagcggtccgatgcggttcccactgcgcctaccccctaatgaaacgtatgggaaaggaaagtctctgccgcgtatcactgtctttttacaatacaaagcaggagattgaatatatggcagagaggctggaacggatctgcgggaggggaagctaatggatgaaaaagaccagacagacatatgccaatcggacatatgccggacagatatatgccgggcagagaaaaagtatattgacagtctgctccggttgcaggaccctggagcccagtgtgaataccttcttatgcttggaatggaaaagcctttgtttgattccctgcgtgtggaccggtacaggattggaggatgcaggactgcaatatggctccgggcagaggaccgggatggaatggtacatttttacagtgacagtgattcgctgctggtacggggcgtgctttccattctggaagaactgtaccaggcaagaacgccggaaatcataaagtcccatcccatgagatttctggattatatatctgacgatgtgatttaccctgagattaaggaaaatggattgtcaaaatgttatcagatgctggcccatatgtgaaatataaaaatctataccaacaatgaaaaccatattaaatgaaaactatgttgagtgaaaacgatatcaaataaaaacgatataaaaggagaggtcaattatgaagtatgcaatggatgtaaaggttaacttaaaaccaattttcagcaatcttgtacacacagactggtgggaaggcccgtgccgcgtagggcctatggaagagggcacgcctgaatttgagcgcagggtggggaaggaacaatttaaaatctggtacgaggaattacagaacaacctggatctgacccgctgtaatctgatggatccggtttacatggaatttgacgagagttttgtgatgcgggattctgaatttgacaagctgatgcctgaaaatcatcaggtggatttgtatttgattacataccgcgtaccgggaatcgagcgtttgaacaagccagtttccatgattaatctgggacctacccccatcgaccttgtgggatattacagggacatcggactggaggcatatatggcccatgactatgaagaatacaaccgtattctgacctgcctccaggtgcgtaaggctgtcgcaaatacaaaaattttaatcctgtccaattccgagcagacgccggcatcagtcaacaccagctgctgtgatctggtaagcctgttcacacggtacggcatccgccataaccgtattgacttcagacaggtgttcaactattttgatgagataccggcagacgagggaatccatcaggaggccagggccctgatggaaggggcggacaaagtggatatcacagaggagtatctgtgcagcgatctgcggtatttccacgcggtgcgcaggatgatggagcgctatgactgcaatgcgttcaccaccccgtgcaaggaactgtgtgccagccgccttccccagaagaataagtgtgttccctgcatcacccactccctaaataaagatgacaggattccgtcagcatgtgaggaggatctggctgtatggatggccatgatgatgatgatgtacctgacccgccagagcgtgttcatgggcaatccggtactggtgcttgccggaagcaggaccttggaacagctgggaatgcccaagcttctgacacagcccggccaggtatttgaccatgatgtactggaaatccaccacgctgtgccggtgcgcaggatgcgcggatttgaccagccggagcagagatatgagctggcccattttaccacccagggctggggcgcccattatcatgtggatatggcagaggaggaaggacaggtggttacctttggccgctttaaccgccagggtaccaggatgatggtagccgtaggccataccctgggatgcgagttccgtcccgtatactgcagtcctgcggtgtattacgaggtcgagggcggcgccagagagttccggcaggcattggcaaagggaggttacggacatcaccaggccattatttacggcaatcatgtaaaggaattacaggagctgggcgaaatcgtgggctttgaggtggaggtgttccactaatcagaaacccaatcaggcccaatcattaaatttttaaaaccccttgacatttccgcaaaaagaggataaactcaataaaaattcataatgaatgcggaacagctcgaaagggagtagtttagatatattgtcaacaacctcggttccaacggaacctggcaatatatgcctttatggttacaagacttttatgcgtggtttgcagatatgttacatatcctggcagccatccatagaagtctttttttgtgggtttcccggcgccggagcgtggcggataagctttttttgccaggcccggggcattttggcgcagggatacgcgcataatagactaagaactcataatgaggaggaaagtacatgaaagaatggtatcaacagacaaaagaagagatactcagccagtttcaggtaacggaacaaggtctgacctcttcccaggcagagaaaatcctggctgagaagggagagaatgtcctggaagagggaaagcgcaagagtaccctgcgggtatttttggagcagttctgcgacctgctggtggttatcctgattattgcagcccttatttccatggtgtcaggcaatgtggagagcacggtagtcatcctggctgttattatcctcaacgccatcctgggcacggtacagcatgcaaaggctgagaaatccctggacagccttaaatccctgtcatcccccaacgccaaggtgttaagggacggacagaaggtggagattccgtctgccaaggtggttcccggagacatcctgtacctggaagcaggcgatctggtggtggctgacggaaggattctggagaattattcccttcaggtcaatgaaagctccctgaccggggagtccaccaatgtggataagagcgacggaaccctgcacagcgactgcgccctggccgaccgggccaatatggtatattccagcggcctggtgacttacggacgggcagtggtcctggtgactgccacgggtatggatacagagattggcaagatagcagccctgatgaacgctaccaaggagaaaaagactccgctgcaggtcagcctggaccagttcggcagccgtcttgccatggcaatcatggtcatatgcgccctggtattcctgctgagcctgtaccgaaaaatgcctgtcctggattccctgatgtttgcagtggccctggcagtggcggccatacctgaggcactgagctccattgtaaccattgtacaggccatgggcacccagaaaatggcaaaagaacatgccattatcaaagagttaaaggctgtggagagtctgggctgcgtctctgtcatctgctcggacaagaccggaaccctgactcagaataagatgacggtccagaacatttacaccaatgggcagaccattaccatagaccagttgaatctgaagaaccagcttcaccgttatcttctctacgatgccatacttaccaacgattcatctatcgttgacggaaaaggcatcggagatcccacagagtttgcgctggtggagatgggaagaaaggcgaccgtggacgaaaacctgctcagagagctgatgccccgtctggaggagataccctttgactcagaccggaagctcatgagtaccaaatacgaacttcacgatgtgcccaccgtacttaccaagggagcattggatgtacttttagaccgcaccgtgaaaatccgtatggaagaaggaatcagggacataacccaggaggatagggaggccattcttcagaagaacctggagttttcccaggagggattaagagtcctggcctttggatataaggaagtacctgaagactataccctgtccctggacaatgagaacgacttcattttcctgggcctgatatccatgatggatcccccaagggaagaatcaaaggcagcagttgcagacgccaagcgggccggaattaagcctgtcatgataaccggcgatcacaagattaccgccactgccattgcaaagcagattggtatttttgaggacggcgatatagccatgacgggccgtgaactggacgccatgtcagaggaagagctggaccgcaagatcacggagatatctgtctacgccagggtttcacctgaaaacaaaatccgcattgtggacgcatggcagaggcgcggatccatcacggccatgaccggagacggagtcaatgacgctcctgcccttaagaaggcggacatcggagtggctatgggcatcaccggcaccgaggtttccaaggatgcggcagccatgatactgacagacgataatttcgcaaccatcatcaaggcggtggccaacggacgaaacgtataccgcaacataaagaatgccatcaagttcctgctgtcaggcaacatggcaggtattctttcggtattatacacatccctggcagccctgccagtgccgtttgccccggtacacctgctgtttatcaaccttctgaccgattcactgccggccatagccatcggcatggagccggctgagaaggatttactgtcggaggcgcccagaaatccgaagacaggcatcctgacaaaggacttcatgaccactattctgacccagggcggaatcatagctgtctgtaccatgatcgccttccacacaggtctcagaaccggcagcgcggccacagccagcaccatggcgtttgcaaccctgaccctggcccgtctgttccacggattcaactgccgcagcaagcacaacattttcaagctgggcttctcatccaactggtacagcctgggagcatttgcggcaggtgtggtgctgttaggtattgtcatgttcgttccgttcatgcagaacctgttttccgtaacaccgctgacccaaagccagctgatcaatgtctgtctcctggccgcagtacccacggtactgatacagatgtttaagattataagagatattaagcataggaaataatggggaattgtggtataatgtccacgtaggcaatgagcagtgcaaaaaagtggtgggcatatatccgttgggagcttgctcacataaggatatatgcctgccgctttttttatagggctaagcccgtgaaccagcggccttggccgcgatgtgcactgctgactgagcccattcaaagctcatcctacccaaaacaaaaccaaccaaaggaaaggggcggtgcttaatggataaggtcataacagtaagccgcgaattcggaagcggaggccgtgaacttggggtaaagctggcagaaaagctggacatcccattttacgacaaggagttaatctccatggctgcggacgatatcaatattgcagaagaggcattccaaaactacgatgagcatatcgtgattcacgacccgttagacaggcagtattaccatgccttttctgacatttacaaagtacccatgtcggaccagattttcgtggcccagtccaatgtcatccgcaggctggctgctcacggtccatgtgtcattgtgggacggtgtgcagacatgattctggatgacagcattaacctgttcatctactccaagatgagggaccggattaagcgtatgcttattttggaaccgggttctgatgagaaggagatggagcgccgtatccgggaggtggaccggaaacgcaaggagtattaccagtactacaccggcaacacatggggccgggcccagaactaccacttatgcctggacagcgggctgacaggggtggacggctgcctgagggcggtgctggcttatctgggagaactgtcggagtaaagcacgggacaagcggtacagggcaggcggaacggacggcagtacaggctgtggaacaggcggcagtacaggcgtttcggtcaaatgaagaatcaggaagaaccaagaaggatattttaacaaaagaagcaaaattcaaataatttcaggaggcagaagatgaaacaggatatgattgtaattcttgacctgggaagcacagaaaacacaaaactggccagggacatcagagagatgggggtgtacagtgagatttatccccacgatatcacagccagcgaactgaaggaacttcccaacgttaagggaatcatcatcaacggcggccctaacaatgttgtggacggaacccccattgatgtgcgtccggaactgtatgaggcaggatacccggtaatggcggcaggccacggcgcggcggcctgtgagcgttccatacatagctgggatgaggctgacagcgcccagattctccgttcctttgtatttgatacatgtaaggcccaggccaactggaatatgaagaactttatttccgaccaggtggaattaatccgccagcaggtaggagacaggaaagtgctgctggctttatccggcggcgtggacagctccgtggtagcggccctgctcatcaaagccattggaaaacagctgacctgcgtccatgtaaaccatggtcttatgagaaaaggggaatccgagagtgttattgatgtattcaaaaaccagatggatgcaaacctggtatatgtggatgctgtagatcgtttcctcggaaagctggccggagtggctgatccggaacagaagcgtaagattatcggcgctgaattcatccgcgtgtttgaggaggaggccagaaagctggagggaatcgagttcctggcccagggaaccatttaccctgacatcgtggagagcggaaccaagacagccaaggtagtaaaatcccaccacaatgtgggagggcttcctgaggatttgaacttcaccctggtagagccgctgcgccagctgttcaaggatgaggtacgcgcctgcggactggagctgggtctgcctcacagcatggtataccgtcagcccttccctggtcccggattaggcgtgcgctgcctgggagccataaccagagaacgtctggaagcggtcagggaatcagatgccattctccgggaggaatttgcaaatgccggcctggacaagacagtgtggcagtattttaccattgtgccggactttaaatcagttggagtcagggacaatgcgcgctgctttgattatcctgtcatcatccgcgcagtcaatacagtggacgcaatgactgcctccattgagcgcattgattatgacgtgctgcagaagattacggaccgtatattgaaggaagttaagaatgtgaacagggtgtgctatgatttgagtccgaagcctacggctacgatt
